(19) United States
(12) Patent Application Publication
(10) Pub. No.: US 2006/0217360 A1
(43) Pub. Date: Sep. 28, 2006

(54) Tubulysin biosynthesis gene

(76) Inventors: Gerhard Hoefle, Braunschweig (DE); Rolf Mueller, Braunschweig (DE); Florenz Sasse, Braunschweig (DE); Axel Sandmann, Braunschweig (DE); Helmut Bloecker, Braunschweig (DE)

Correspondence Address: Ronald R Santucci;Frommer Lawrence & Haug, 745 Fifth Avenue, New York, NY, 10151, US

(21) Appl. No.: 10/526,572

(22) PCT Filed: Sep. 3, 2003
(86) PCT No.: PCT/EP03/09780

§ 371 Date: Oct. 11, 2005

(30) Foreign Application Priority Data
Sep. 5, 2002 (DE) 102 41 152.2

(51) Int. Cl. C12Q 1/68; C07H 21/04; C12P 21/06; C12P 17/00; A61K 31/33; C12N 15/74

(52) U.S. Cl. 514/183; 435/6; 435/69.1; 435/117; 435/252.3; 435/471; 536/23.2

(57) ABSTRACT

The invention relates to an ssDNA molecule, to a dsDNA molecule, to an RNA, to a vector, to the use thereof and to a cell, especially for the expression of tubulysin genes.

[0001] Tubulysins have already been put forward, in Irsee, as a new family of substances from Myxobacteria, which acts on the tubulin skeleton; cf. PCT/EP 97/05095 and DE 100 08 089.8 and the literature cited therein. In contrast to epothilones, they exhibit a microtubule-degrading action and increased formation of centrosomes. With a cytotoxicity of IC₅₀=10-500 pg, tubulysins are especially interesting as potential cytostatic agents.

[0002] Tubulysins have a cytostatic or antimitotic action on fungi, human tumours or cancer cell lines and other animal cell cultures (cf. Table). Within the cells, they result in rapid degradation of the microtubule structure. The actin skeleton is preserved. Under the influence of tubulysins, adherently growing L929 mouse cells increase in volume without dividing and develop large cell nuclei, which then break up in an apoptotic process.

Spectrum of action

Inhibition zone [mm]

| Fungi | Tubulysin A | Tubulysin B |
|---|---|---|
| Aspergillus niger | 20 | 18 |
| Botrytis cineria | 23 | 18 |
| Coprinus cinereus | 20 | |
| Pythinum debaryanum | 20 | |

| | IC₅₀ [ng/ml] | | |
|---|---|---|---|
| | Tubulysin A | Tubulysin B | Tubulysin C |
| Human cancer cell line | | | |
| KB-3-1 | 0.01 | 0.02 | 0.1 |
| (DSM ACC 158) | | | |
| K-562 | 0.1 | 0.2 | 1.5 |
| (ATCC CCL 243) | | | |
| HL-60 | 0.04 | 0.08 | 0.4 |
| (ATCC-CCL 240) | | | |
| Animal cell lines | | | |
| L929, mouse | 0.2 | 0.4 | 2 |
| (ATCC CCL1) | | | |
| Pt K2, Potorous tridactylis | 0.2 | 0.2 | 2 |
| (ATCC CCL 56) | | | |

Agar diffusion test: 20 μg per test disc of 6 mm diameter

[0003] According to one embodiment, the invention relates to an ssDNA molecule selected from the following group:
[0004] (i) an ssDNA molecule having a sequence according to FIG. 1;
[0005] (ii) an ssDNA molecule which is 90, 91, 92, 93, 94, 95, 96, 97, 98, 99 or 100% homologous to an ssDNA molecule according to (i) in respect of its number of nucleotides or its nucleotide sequence but which differs by at least one nucleotide from the ssDNA molecule according to (i) in respect of its number of nucleotides and/or its nucleotide sequence; and
[0006] (iii) an ssDNA molecule having a sequence which is complementary to the sequence of an ssDNA molecule according to (i) or (ii).

[0007] The invention relates furthermore to a dsDNA molecule comprising an ssDNA molecule according to the invention and a strand complementary thereto.

[0008] According to a further embodiment, the invention relates to an ssDNA molecule selected from the following group:
[0009] (i) an ssDNA molecule having a sequence of positions 3,308 to 1 (ORF 16) of the sequence according to FIG. 1;
[0010] (ii) an ssDNA molecule having a sequence of positions 4706 to 3453 (ORF 15) of the sequence according to FIG. 1;
[0011] (iii) an ssDNA molecule having a sequence of positions 5719 to 7164 (ORF 14) of the sequence according to FIG. 1;
[0012] (iv) an ssDNA molecule having a sequence of positions 9557 to 7317 (ORF 13) of the sequence according to FIG. 1;
[0013] (v) an ssDNA molecule having a sequence of positions 12193 to 10550 (ORF 12) of the sequence according to FIG. 1;
[0014] (vi) an ssDNA molecule having a sequence of positions 12841 to 13881 (ORF 11) of the sequence according to FIG. 1;
[0015] (vii) an ssDNA molecule having a sequence of positions 14833 to 13835 (ORF 10) of the sequence according to FIG. 1;
[0016] (viii) an ssDNA molecule having a sequence of positions 14942 to 15586 (ORF 9) of the sequence according to FIG. 1;
[0017] (ix) an ssDNA molecule having a sequence of positions 15.847 to 16983 (ORF 8) of the sequence according to FIG. 1;
[0018] (x) an ssDNA molecule having a sequence of positions 21154 to 18809 (ORF 7) of the sequence according to FIG. 1;
[0019] (xi) an ssDNA molecule having a sequence of positions 22366 to 23532 (ORF 6) of the sequence according to FIG. 1;
[0020] (xii) an ssDNA molecule having a sequence of positions 24591 to 26513 (ORF 5) of the sequence according to FIG. 1;
[0021] (xiii) an ssDNA molecule having a sequence of positions 26597 to 27517 (ORF 4) of the sequence according to FIG. 1;
[0022] (xiv) an ssDNA molecule having a sequence of positions 29858 to 30400 (ORF 3) of the sequence according to FIG. 1;
[0023] (xv) an ssDNA molecule having a sequence of positions 31220 to 32392 (TubA) of the sequence according to FIG. 1;
[0024] (xvi) an ssDNA molecule having a sequence of positions 33056 to 32397 (ORF 2) of the sequence according to FIG. 1;
[0025] (xvii) an ssDNA molecule having a sequence of positions 34195 to 33074 (TubZ) of the sequence according to FIG. 1;
[0026] (xviii) an ssDNA molecule having a sequence of positions 35422 to 34205 (ORF 1) of the sequence according to FIG. 1;
[0027] (xix) an ssDNA molecule having a sequence of positions 35522 to 40147 (TubB) of the sequence according to FIG. 1;
[0028] (xx) an ssDNA molecule having a sequence of positions 40144 to 48021 (TubC) of the sequence according to FIG. 1;
[0029] (xxi) an ssDNA molecule having a sequence of positions 48011 to 58558 (TubD) of the sequence according to FIG. 1;
[0030] (xxii) an ssDNA molecule having a sequence of positions 58551 to 62096 (TubE) of the sequence according to FIG. 1;
[0031] (xxiii) an ssDNA molecule having a sequence of positions 62103 to 70616 (TubF) of the sequence according to FIG. 1;
[0032] (xxiv) an ssDNA molecule which is hybridisable with a molecule according to (i), (ii), (iii), (iv), (v), (vi), (vii), (viii), (ix), (x), (xi), (xii), (xiii), (xiv), (xv), (xvi), (xvii), (xviii), (xix), (xx), (xxi), (xxii) or (xxiii) under stringent conditions and especially has the same number of bases; and
[0033] (xxv) an ssDNA molecule which is 90, 91, 92, 93, 94, 95, 96, 97, 98, 99 or 100% homologous to an ssDNA molecule according to (i), (ii), (iii), (iv), (v), (vi), (vii), (viii), (ix), (x), (xi), (xii), (xiii), (xiv), (xv), (xvi), (xvii), (xviii), (xix), (xx), (xxi), (xxii) or (xxiii) in respect of its number of nucleotides or its nucleotide sequence but which differs by at least one nucleotide from that ssDNA molecule in respect of its number of nucleotides and/or its nucleotide sequence; and
[0034] (xxvi) an ssDNA molecule having a sequence which is complementary to the sequence of a molecule according to (i), (ii), (iii), (iv), (v), (vi), (vii), (viii), (ix), (x), (xi), (xii), (xiii), (xiv), (xv), (xvi), (xvii), (xviii), (xix), (xx), (xxi), (xxii), (xxiii), (xxiv) or (xxv).

[0035] The invention relates furthermore to a dsDNA molecule comprising such an ssDNA molecule according to the invention and a strand complementary thereto.

[0036] According to a further embodiment, the invention relates to an ssDNA molecule selected from the following group:
[0037] (i) an ssDNA molecule having a sequence of positions 35747 to 36769 (domain C of the tubB gene) of the sequence according to FIG. 1;
[0038] (ii) an ssDNA molecule having a sequence of positions 37184 to 39817 (domain A of the tubB gene) of the sequence according to FIG. 1;
[0039] (iii) an ssDNA molecule having a sequence of positions 38369 to 39730 (domain NMT of the tubB gene) of the sequence according to FIG. 1;
[0040] (iv) an ssDNA molecule having a sequence of positions 39818 to 40069 (domain PCP of the tubB gene) of the sequence according to FIG. 1;
[0041] (v) an ssDNA molecule having a sequence of positions 40372 to 41397 (domain C of the tubC gene) of the sequence according to FIG. 1;
[0042] (vi) an ssDNA molecule having a sequence of positions 41824 to 43215 (domain A of the tubC gene) of the sequence according to FIG. 1;
[0043] (vii) an ssDNA molecule having a sequence of positions 43216 to 43461 (domain PCP of the tubC gene) of the sequence according to FIG. 1;
[0044] (viii) an ssDNA molecule having a sequence of positions 43552 to 44574 (domain C of the tubC gene) of the sequence according to FIG. 1;
[0045] (ix) an ssDNA molecule having a sequence of positions 44980 to 47631 (domain A of the tubC gene) of the sequence according to FIG. 1;
[0046] (x) an ssDNA molecule having a sequence of positions 46153 to 47547 (domain NMT of the tubC gene) of the sequence according to FIG. 1;
[0047] (xi) an ssDNA molecule having a sequence of positions 47632 to 47868 (domain PCP of the tubC gene) of the sequence according to FIG. 1;
[0048] (xii) an ssDNA molecule having a sequence of positions 48011 to 49321 (domain KS of the tubD gene) of the sequence according to FIG. 1;
[0049] (xiii) an ssDNA molecule having a sequence of positions 49622 to 50584 (domain AT of the tubD gene) of the sequence according to FIG. 1;
[0050] (xiv) an ssDNA molecule having a sequence of positions 51473 to 52309 (domain KR of the tubD gene) of the sequence according to FIG. 1;
[0051] (xv) an ssDNA molecule having a sequence of positions 53066 to 53980 (domain ER of the tubD gene) of the sequence according to FIG. 1;
[0052] (xvi) an ssDNA molecule having a sequence of positions 54158 to 54460 (domain ACP of the tubD gene) of the sequence according to FIG. 1;
[0053] (xvii) an ssDNA molecule having a sequence of positions 54461 to 55870 (domain HC of the tubD gene) of the sequence according to FIG. 1;
[0054] (xviii) an ssDNA molecule having a sequence of positions 56000 to 57412 (domain A of the tubD gene) of the sequence according to FIG. 1;
[0055] (xix) an ssDNA molecule having a sequence of positions 57413 to 57643 (domain PCP of the tubD gene) of the sequence according to FIG. 1;
[0056] (xx) an ssDNA molecule having a sequence of positions 58689 to 59714 (domain C of the tubE gene) of the sequence according to FIG. 1;
[0057] (xxi) an ssDNA molecule having a sequence of positions 60156 to 61697 (domain A of the tubE gene) of the sequence according to FIG. 1;
[0058] (xxii) an ssDNA molecule having a sequence of positions 61698 to 61967 (domain PCP of the tubE gene) of the sequence according to FIG. 1;
[0059] (xxiii) an ssDNA molecule having a sequence of positions 62127 to 63320 (domain KS of the tubF gene) of the sequence according to FIG. 1;
[0060] (xxiv) an ssDNA molecule having a sequence of positions 63711 to 64676 (domain AT of the tubF gene) of the sequence according to FIG. 1;
[0061] (xxv) an ssDNA molecule having a sequence of positions 64959 to 65882 (domain KR of the tubF gene) of the sequence according to FIG. 1;
[0062] (xxvi) an ssDNA molecule having a sequence of positions 65985 to 67061 (domain CMT of the tubF gene) of the sequence according to FIG. 1;
[0063] (xxvii) an ssDNA molecule having a sequence of positions 67242 to 67829 (domain DH of the tubF gene) of the sequence according to FIG. 1;
[0064] (xxviii) an ssDNA molecule having a sequence of positions 68247 to 69128 (domain ER of the tubF gene) of the sequence according to FIG. 1;
[0065] (xxix) an ssDNA molecule having a sequence of positions 69360 to 69605 (domain PCP of the tubF gene) of the sequence according to FIG. 1;
[0066] (xxx) an ssDNA molecule having a sequence of positions 69759 to 70586 (domain TE of the tubF gene) of the sequence according to FIG. 1;
[0067] (xxxi) an ssDNA molecule which is hybridisable with a molecule according to (i), (ii), (iii), (iv), (v), (vi), (vii), (viii), (ix), (x), (xi), (xii), (xiii), (xiv), (xv), (xvi), (xvii), (xviii), (xiv), (xx), (xxi), (xxii), (xxiii), (xxiv), (xxv), (xxvi), (xxvii), (xxviii), (xxix) or (xxx) under stringent conditions and especially has the same number of bases;
[0068] (xxxii) an ssDNA molecule which is 90, 91, 92, 93, 94, 95, 96, 97, 98, 99 or 100% homologous to an ssDNA molecule according to (i), (ii), (iii), (iv), (v), (vi), (vii), (viii), (ix), (x), (xi), (xii), (xiii), (xiv), (xv), (xvi), (xvii), (xviii), (xiv), (xx), (xxi), (xxii), (xxiii), (xxiv), (xxv), (xxvi), (xxvii), (xxviii), (xxix) or (xxx) in respect of its number of nucleotides or its nucleotide sequence but which differs by at least one nucleotide from that ssDNA molecule in respect of its number of nucleotides and/or its nucleotide sequence; and
[0069] (xxxiii) an ssDNA molecule having a sequence which is complementary to the sequence of a molecule according (i), (ii), (iii), (iv), (v), (vi), (vii), (viii), (ix), (x), (xi), (xii), (xiii), (xiv), (xv), (xvi), (xvii), (xviii), (xiv), (xx), (xxi), (xxii), (xxiii), (xxiv), (xxv), (xxvi), (xxvii), (xxviii), (xxix), (xxx), (xxxi) or (xxxii).

[0070] The invention relates furthermore to a dsDNA molecule comprising such an ssDNA molecule and a strand complementary thereto.

[0071] The invention relates furthermore to variants or mutants which result from a substitution, insertion or deletion of nucleotides or from an inversion of nucleotide segments of an ssDNA molecule according to the invention or of a dsDNA molecule according to the invention, those variants and mutants encoding enzyme variants or enzyme mutants for the production of secondary substance(s) having the properties characteristic of tubulysins described at the beginning, especially having cytostatic action. The person skilled in the art will be familiar with mass screening.

[0072] The invention relates furthermore to RNA
[0073] (a) having a sequence corresponding to that of an ssDNA molecule according to the invention or
[0074] (b) having a sequence of an RNA according to (a) but in the opposite direction (anti-sense), or
[0075] (c) having a sequence of an RNA according to (a) or (b) and having a strand complementary thereto,
   in each case optionally as an element of a recombinant vector.

[0076] In accordance with a further embodiment, the invention relates to a recombinant vector, especially an expression vector, having a DNA molecule according to the invention.

[0077] In accordance with a further embodiment, the invention relates to a cell, especially for expression, into which a DNA molecule according to the invention or a vector according to the invention has been integrated.

[0078] The cell according to the invention can be derived from culturable bacteria such as Myxobacteria such as Angiococcus, especially A. disciformis, Archangium, especially A. gephyra, Escherichia coli, pseudomonads or actinomycetes.

[0079] In accordance with a further embodiment, the invention relates to use of a vector according to the invention for the transformation of cells or organisms for the transient or permanent expression of one or more proteins (expression product(s) which is/are encoded by a DNA (ssDNA or dsDNA) of the vector).

[0080] In accordance with a further embodiment, the invention relates to use of a cell according to the invention for the enzymatic biosynthesis, metasynthesis or partial synthesis of a tubulysin, especially tubulysin A, B, C, D, E and/or F.

[0081] In accordance with a further embodiment, the invention relates to an expression product of a DNA molecule according to the invention or of a vector according to the invention or of a cell according to the invention.

[0082] The present invention relates especially to a polynucleotide comprising a sequence as defined in SEQ ID NO: 1, 18, 33 or 36 or a fragment thereof. SEQ ID NO: 1 and 18 describe the (+) and (−) strands, respectively, of the tubulysin biosynthesis cluster of Angiococcus disciformis. SEQ ID NO: 33 is a sequence comprising several overlapping genes of the cluster. SEQ ID NO: 36 describes a mutant of Angiococcus disciformis. It was found, surprisingly, that this mutant exhibited tubulysin D production many times that of the wild type. The tubulysin overexpression, in terms of the overall activity of all tubulysin derivatives, is even higher that that of tubulysin D, which on no account was to be expected. The genes of SEQ ID NO: 36 are clearly involved in the negative regulation of tubulysin expression. This mutant is, by virtue of the increased expression of all tubulysins, especially suitable for the production of the polypeptides according to the invention. Antibodies against the wild type expression products of that sequence can be used to minimise their negative influence on tubulysin production even in other strains. Antisense-RNA or RNAi techniques which interact with the wild type sequence of the negative regulator genes also have a similar effect.

[0083] The fragments of the polynucleotide may have any desired partial sequence and length, but preference is given to those fragments which encode proteins. The polynucleotides of the present invention also include, but are not limited to, a polynucleotide which hybridises at the complementary strand of the disclosed nucleotide sequences under moderately stringent or stringent conditions; a polynucleotide which is an allele variant of any polynucleotide described above; a polynucleotide which encodes a species homologue of any of the proteins disclosed herein; and a polynucleotide which encodes a polypeptide which has an additional specific domain or a truncation or shortening of the disclosed proteins.

[0084] The term “CDS” denotes a sequence of nucleotides which corresponds to the sequence of amino acids in a protein, that is to say the amino-acid-encoding sequence regions, including the respective start and stop codons.

[0085] In a preferred embodiment, the polynucleotide according to the invention is a fragment which is a CDS defined in the sequence protocol.

[0086] The present invention relates furthermore to a vector comprising a polynucleotide as described above. Vectors for various purposes are known in the prior art, as well as the techniques for subcloning polynucleotides into such vectors. These are described in the new edition of Molecular Cloning: A Laboratory Manual, (Sambrook et al., (1989) Molecular Cloning: A Laboratory Manual, 2nd ed., Cold Spring Harbor Laboratory Press); DNA Cloning, Volumes I and II (D. N. Glover ed., 1985); Gene Transfer Vectors for Mammalian Cells (Miller & Calos, eds.); Current Protocols in Molecular Biology and Short Protocols in Molecular Biology, 3rd Edition (F. M. Ausubel et al., eds.); Recombinant DNA Methodology (R. Wu ed., Academic Press) or “A Practical Guide To Molecular Cloning”. Examples of vectors are to be found, inter alia, in Gene Transfer Vectors For Mammalian Cells (J. H. Miller and M. P. Calos eds., 1987, Cold Spring Harbor Laboratory).

[0087] The vector is preferably an expression vector, that is to say in general a plasmid, a phage, a virus or a vector for expressing a polypeptide from a DNA (RNA) sequence. An expression vector can encompass a transcription unit which has an arrangement of the following: (1) a genetic element or elements with a regulatory role in gene expression, for example promoters or enhancers, (2) a structural sequence or coding sequence which is transcribed into mRNA and translated into a protein and (3) suitable transcription initiation and termination sequences. Structural units which are provided for use in yeasts or eukaryotic expression systems preferably include a leader sequence which makes possible extracellular secretion of a translated protein by a host. Alternatively, when a recombinant protein without a leader or transport sequence is expressed, it may include an N-terminal methionine residue. That residue may, but need not, be removed from the expressed recombinant protein subsequently in order to obtain the end product.

[0088] The present invention relates furthermore to a cell comprising such a vector. The vector can be introduced into the cell by means of the known techniques such as, for example, transfection, electroporation, lipofection etc. In the case of viral vectors, infection is also possible. The cells may be eukaryotic or prokaryotic cells.

[0089] The methods for selecting and propagating the cells comprising the vector will also be known to the person skilled in the art. Examples of the culturing of cells of animal origin are to be found, inter alia, in Culture Of Animal Cells (R. I. Freshney, Alan R. Liss, Inc., 1987).

[0090] A further embodiment relates to a polypeptide comprising at least one sequence as defined in SEQ ID NO: 2 to 17, 19 to 32, 34, 35, 37 and/or 38 and/or a fragment and/or derivative thereof. The polypeptide can be made available by expression of a polynucleotide or by chemical synthesis.

[0091] The amino acid sequences of the present invention also encompass all sequences that differ from the sequences disclosed herein as a result of amino acid insertions, deletions and substitutions. Amino acid “substitutions” are preferably the result of replacing an amino acid by another amino acid having similar structural and/or chemical properties, that is to say conservative amino acid exchanges. Amino acid substitutions may be made on the basis of a similarity in polarity, charge, solubility, hydrophobicity, hydrophilicity and/or the amphiphatic nature of the residues included. For example, non-polar (hydrophobic) amino acids include alanine, leucine, isoleucine, valine, proline, phenylalanine, tryptophan and methionine; polar neutral amino acids include glycine, serine, threonine, cysteine, tyrosine, asparagine and glutamine; positively charged (basic) amino acids include arginine, lysine and histidine; and negatively charged (acidic) amino acids include aspartic acid and glutamic acid.

[0092] “Insertions” or “deletions” typically occur in the range of 1-3 amino acids. The allowed variation can be determined by experiment, by systematically making insertions, deletions or substitutions of amino acids in a polypeptide molecule using DNA recombination techniques and testing the resulting recombinant variants with respect to their activity, for which the person skilled in the art is not required to go beyond the performance of routine experiments.

[0093] For example, the polypeptide can also be in the form of a chimeric polypeptide encoded by a fusion gene, which comprises at least one further sequence. This additional sequence can serve the purpose of, for example, facilitating purification of the expression product or providing the expression product with an additional function.

[0094] Examples of additional sequences facilitating purification are so-called tags, which will be known to the person skilled in the art, for example the his-tag.

[0095] In addition, the present invention relates to use of at least one sequence as defined in SEQ ID NO: 1, 18, 33 and/or 36 and/or at least one fragment thereof and/or at least one polypeptide as defined in SEQ ID NO: 2 to 17, 19 to 32, 34, 35, 37 and/or 38 and/or at least one fragment thereof in the production of a pharmaceutical composition for the treatment of undesirable cell growth or undesirable-cell proliferation in an individual. The composition may comprise, for example, a suitable vector together with auxiliary factors which make possible the expression of a tubulysin, preferably in the undesirable cells, and as a result prevent further growth or further proliferation of those cells. The composition may also comprise cells according to the invention which have been transfected with a vector, for example a tubulysin-expressing vector.

[0096] In a preferred embodiment, the undesirable cell growth or undesirable cell proliferation is a tumour. The tumour may be a benign growth or a malignant growth.

[0097] In a further embodiment, the undesirable cell growth is a pathogenic infection, in which case the pathogen may be single-celled or multi-celled. This also includes infections with fungi, for example Candida or Aspergillus, and infections with parasites, for example trypanosomes or schistosomes. In a preferred embodying form of use, the pathogenic infection is a mycosis, malaria or a parasitic disease.

[0098] The invention relates furthermore to a pharmaceutical composition comprising at least one polynucleotide as defined in SEQ ID NO: 1, 18, 33 and/or 36 and/or at least one fragment thereof and/or at least one polypeptide as defined in SEQ ID NO: 2 to 17, 19 to 32, 34, 35, 37 and/or 38 and/or at least one fragment thereof. The compositions comprise a therapeutically active amount or dose of the active ingredient or component in question. A therapeutically active dose relates to that amount of the compound which is sufficient to produce an alleviation of symptoms, for example treatment, cure, prevention or alleviation of such conditions, especially inhibition or prevention of undesirable cell growth and cell proliferation, in a patient. Suitable administration routes include, for example, parenteral administration, including intramuscular and subcutaneous injections and also intrathecal, direct intraventricular, intravenous and intraperitoneal injections.

[0099] In a further embodiment, the pharmaceutical composition comprises at least one pharmaceutically acceptable carrier. Such a composition may further comprise (in addition to the component and carrier) diluents, fillers, salts, buffers, stabilisers, solubility enhancers and other materials well known in the prior art. The expression “pharmaceutically acceptable” means a non-toxic material which does not impair the efficacy of the biological activity of the active component(s). The properties of the carrier depend on the administration route. The therapeutic composition may furthermore comprise further agents or active substances which improve the activity or efficacy or facilitate use during treatment. Such additional factors and/or agents may be included in the therapeutic composition in order to produce a synergistic effect or to minimise side-effects. Techniques for formulation, preparation and administration of the compounds of the present invention are to be found in “Remington's Pharmaceutical Sciences”, Mack Publishing Co., Easton, Pa., latest edition.

[0100] In addition, the present invention relates to a method of producing tubulysins and tubulysin biosynthesis proteins, comprising the steps:
[0101] (a) expression of at least one polynucleotide as defined in SEQ ID NO: 1, 18, 33 and/or 36 and/or at least one fragment thereof and/or at least one polypeptide as defined in SEQ ID NO: 2 to 17, 19 to 32, 34, 35, 37 and/or 38 and/or at least one fragment thereof, and
[0102] (b) purification of the expression products.
   Methods for the expression of proteins are known to the person skilled in the art and can be found from the relevant literature, for example from Methods In Enzymology, Vols. 154 and 155 (Wu et al. eds.) or Recombinant DNA Methodology (R. Wu ed., Academic Press). For the purification of expression proteins a large number of methods are known to the person skilled in the art. In addition to chromatographic methods such as, for example, affinity chromatography or HPLC, immunological procedures such as, for example, immobilised antibodies against an epitope on the expression product, for example a His-tag, can also be used for purification of the products.

[0103] In a preferred embodiment, expression is carried out in prokaryotic or eukaryotic cells and/or by in vitro expression. The expression of polypeptides in prokaryotic or eukaryotic cells is a frequently used method and is generally achieved by means of an expression vector as described hereinbefore. Vectors have likewise already been described for in vitro expression. These, and the necessary factors, are commercially available in the form of kits, for example from BioRad, Stratagene, Invitrogen and Clontech.

[0104] The invention relates moreover to a method of finding genes which are involved in the biosynthesis of tubulysins. The method comprises the following steps:
[0105] (a) hybridisation of at least one polynucleotide as defined in SEQ ID NO: 1, 18, 33 and/or 36 and/or at least one fragment thereof with DNA, RNA and/or cDNA of a species that is not identical to Angiococcus disciformis, and
[0106] (b) isolation and characterisation of the hybridised DNA, RNA and/or cDNA.
   The hybridisation can be carried out under conditions of differing stringency.

[0107] The stringency of the hybridisation, as used herein, relates to conditions under which polynucleotide double strands are stable. As the person skilled in the art will know, the stability of a double strand is a function of the sodium ion concentration and temperature (see, for example, Sambrook et al., Molecular Cloning: A Laboratory Manual 2^{nd} Ed. (Cold Spring Harbor Laboratory, (1989)). The levels of stringency used for the hybridisation can be readily adapted by the person skilled in the art.

[0108] The expression “low-stringency hybridisation” denotes conditions which are equivalent to hybridisation in 10% formamide, 5× Denhart's solution, 6×SSPE, 0.2% SDS at 42° C., followed by washing in 1×SSPE, 0.2% SDS at 50° C. Denhart's solution and SSPE, like other suitable hybridisation buffers, are well known to the person skilled in the art.

[0109] “Moderate-stringency hybridisation” means conditions which allow DNA to bind to a complementary nucleic acid that has approximately 60% identity, preferably approximately 75% identity, especially approximately 85% identity, with that DNA, special preference being given to identity of more than approximately 90% with that DNA. Moderate-stringency conditions are preferably conditions which are equivalent to hybridisation in 50% formamide, 5× Denhart's solution, 5×SSPE, 0.2% SDS at 42° C., followed by washing in 0.2×SSPE, 0.2% SDS at 65° C.

[0110] High-stringency hybridisation means conditions which allow hybridisation only of those nucleic acid sequences which form stable double strands in 0.018M NaCl at 65° C. (i.e., when a double strand is not stable in 0.018M NaCl at 65° C., it is not stable under the high-stringency conditions described/defined herein).

[0111] Nucleic acid hybridisation techniques can be used, moreover, in order to identify and obtain a nucleic acid which is encompassed by the present invention. In brief, any nucleic acid having a certain homology to a sequence disclosed in this invention or a fragment thereof can be used as a probe for identification of a similar nucleic acid by hybridisation under moderate-stringency to high-stringency conditions. Such similar nucleic acids can then be isolated, sequenced and analysed in order to determine whether they are encompassed by the present invention.

[0112] In addition, the present invention makes available a kit for the production of tubulysins, comprising:
[0113] (a) at least one polynucleotide comprising a sequence as defined in SEQ ID NO: 1, 18, 33 or 36 or a fragment thereof and/or at least one vector comprising such a polynucleotide or
[0114] (b) suitable media and buffers for the multiplication of cells which allow expression of the polynucleotide and/or vector, and
[0115] (c) suitable means for purification of the expression product(s).

[0116] By virtue of their action on the tubulin skeleton and their cytotoxicity, especially in the case of fungi, tubulins are also suitable as a disinfectant which can reduce or prevent contamination with tubulin-containing cells.

[0117] The invention accordingly relates also to use of a composition comprising at least one polypeptide as defined in SEQ ID NO: 2 to 17, 19 to 32, 34, 35, 37 and/or 38 and/or at least one biologically active fragment or derivative thereof as a disinfectant. In addition to the polypeptide defined above, other substances having a disinfecting action can also be present in the disinfectant provided that they do not inhibit the action of the polypeptide according to the invention. In addition, the disinfectant can comprise further adjuvants such as, for example, buffers, water, dyes, fragrances, stabilisers, carriers etc.

[0118] In a preferred embodiment, the composition is liquid or in powder form.

[0119] Accordingly, the invention relates also to disinfectants as defined above.

[0120] Insofar as no other definitions are given, all technical and scientific expressions used herein have the same meaning as that usually understood by the skilled person in the field to which the invention is directed. All publications, patent applications, patents and other references mentioned herein are included in their entirety by way of reference. However, in the event of a conflict, the present description, including the definitions, shall be decisive. In addition, the materials, methods and examples are merely illustrative and should not be interpreted as being limiting.

1. Identification of the Tubulysin Biosynthesis Cluster in Angiococcus disciformis An d48 as a Result of Mariner Transposon Mutagenesis Using pMycoMar

[0121] Identification of the tubulysin biosynthesis cluster was carried out by constructing a transposon mutant bank from Angiococcus disciformis An d48 using pMycoMar.

[0122] Rubin & Mekalanos (Proc. Natl. Acad. Sci. USA, 96 (1999), 1645-1650) developed, from the mariner element Himar1, the plasmid pMycoMar, which constitutes a simple transposition system capable of efficiently infecting bacteria in vivo and generating insertion mutants. This plasmid comprises the mini-transposon magellan4, in which the Tn5 kanamycin resistance gene and oriR6K are flanked by the inverted repeats of Himar1. In addition, Himar1 transposase was cloned into the mycobacterial temperature-sensitive replicon pPR23 under the transcriptional control of the T6 promoter. pMycoMar likewise encodes a gentamycin resistance gene.

[0123] On transposition, Himar1 is distinguished by a TA dinucleotide recognition sequence. It can therefore randomly integrate into a host genome and, statistically speaking, switch off all active genes by means of an insertion mutation. On the basis of that fact, the intention was to generate a mutant bank from An d48 and identify the tubulysin biosynthesis cluster by means of a knockout mutant.

[0124] Alternatively, it is also possible to start from Archangium gephyra DSM 11092 and to proceed in accordance with a protocol of Biozym Diagnostic (Oldendorf, DE; catalogue TSM99K2; pEZ::TN<KAN-2> Tnp transposome kit).

1.1 Generation of the Mutant Bank

[0125] Two different protocols were used for electrotransformation of A. disciformis An d48. These protocols were established for the myxobacteria Stigmatella aurantiaca (Stamm & Plaga, Arch. Microbiol., 172 (1995), 483-494) and Myxococcus xanthus (Kashefi & Hartzell, Mol. Microbiology, 15 (1995) 483-494). The two methods showed no difference in the transformation efficiency of A. disciformis An d48 so that the electrotransformation for construction of the transposon bank was carried out according to the protocol for Stigmatella aurantiaca. The two protocols are described hereinbelow.

1.1.1. Electrotransformation of Angiococcus disciformis An d48 According to the Stigmatella aurantiaca Protocol

[0126] An A. disciformis culture grown in 50 ml of tryptone medium (10 g of tryptone; 2 g of MgSO4₂; 0.1% vitamin B12 [10 ng/ml]; 0.2% glucose per 1 litre of medium; pH 7.2) is cultured at 30° C. to 2*10⁸ cells/ml. On the basis of a generation time of 6 hours, this culture was inoculated the day before so that, as calculated, this cell density would be achieved. The culture is centrifuged at 20° C. (20 min; 4000 rpm) and the cells are resuspended in the same volume of washing buffer (5 mM HEPES/NaOH, 0.5 mM CaCl₂; pH 7.2). After centrifuging again, they are resuspended in 25 ml of buffer and centrifuged again. Before that centrifugation step, the absolute cell count in the 25 ml is determined so that, as calculated, 1*10⁹ cells/40 μl are resuspended.

Electroporation Conditions:

[0127] 1-3 μg of DNA and 40 μl of cell suspension are mixed and transferred into an electroporation cuvette (0.1 cm) cooled on ice. The electroporation is performed at 200Ω, 25 mF and 0.85 kV/cm.

[0128] Immediately after the electroporation, 1 ml of tryptone medium is added. After transfer into 50 ml of tryptone medium, the cells are shaken for 6 h at 30° C. to allow phenotypic expression. The culture is then centrifuged (20 min, 4000 rpm, 20° C.) and resuspended in 1 ml of tryptone. On the basis of a 100% survival rate for the cells, a dilution series is produced and 1*10⁸-1*10⁴ cells are plated with 3 ml of tryptone soft agar onto kanamycin-containing (50 μg/ml) tryptone plates. The plates are incubated at 30° C. and the first clones can be seen after 5-8 days.

1.1.2. Electrotransformation of Angiococcus disciformis An d48 According to the Myxococcus xanthus Protocol

[0129] The growth conditions of the preculture and main culture and the centrifugations and subsequent concentration of the cell count were exactly as described under 1.1.1. This was optimised in a manner that departs from the standard protocol for Myxococcus xanthus.

Electroporation Conditions:

[0130] 1-3 μg of DNA and 40 μl of cell suspension are mixed and transferred into an electroporation cuvette (0.1 cm) cooled on ice. The electroporation is performed at 400Ω, 25 μF and 0.65 kV/cm.

[0131] Immediately after the electroporation, 1 ml of tryptone medium is added and shaking is carried out in a 1.5 ml Eppendorf reagent vessel for 6 h at 30° C. On the basis of a 100% survival rate for the cells, a dilution series is produced and 1*10⁸-1*10⁴ cells are plated with 3 ml tryptone soft agar onto kanamycin-containing (50 μg/ml) tryptone plates. The plates are incubated at 30° C. and after 5-8 days the first clones/mutants can be seen, which were picked using an inoculation loop.

1.2 Culturing of Transposon Mutants

[0132] The mutants were incubated in 96-well microtitre plates in 200 μl of M7 medium (5 g of Probion; 1 g of CaCl₂; 1 g of MgSO4₄; 1 g of yeast extract; 5 g of starch; 10 g of HEPES; 0.1% vitamin B12 [10 ng/ml] per 1 litre of medium; pH 7.4) at 32° C., and after 10 days a copy of the entire bank was produced. For the purpose, 50 μl of culture of each mutant were transferred with 100 μl of M7 medium to new microtitre plates. After incubation for a further seven days, a copy was frozen at −80° C. to provide long-term cultures. The remaining copy of the bank was extracted and the extract was tested for generated tubulysin knockout mutants by means of a toxicity test.

[0133] When mutants were identified which exhibited changes with respect to the wild type in this analysis (no cell nucleus fragmentation), these were recultured from the long-term culture. For control of the results obtained, 50 ml of M7-medium large cultures of the mutants in question had to be tested again. In the case of possible tubulysin knockout mutants, the extracts were first fractionated by means of an HPLC run and the fractions were then tested for tubulysin by means of a toxicity test. The prior fractionation avoided masking of the tubulysin action by myxothiazole. Because the two secondary metabolites have different retention times on elution from a C-14 column, they are each contained in different fractions in the following toxicity test.

1.3 Toxicity Test

[0134] After culturing, the mini-cultures from the 96-well microtitre plates were concentrated to dryness by nitrogen-blowing on a heating block at 37° C. Afterwards, the cell pellets were resuspended in 100 μl of methanol over 2 h, and 10 μl were used in each case for the following toxicity test in order to be able to detect tubulysin production by the mutant in question.

[0135] For this test, L929 cells are cultured in DMEM medium (Invitrogen, Groningen) at 37° C. and then carefully harvested using a cell scraper. This cell suspension is then diluted 1:10 with DMEM, and 120 μl are distributed per hole of a 96-well microtitre plate. 10 μl of cell extract of the individual transposon mutants are then added thereto and incubated for five days at 37° C. After that incubation period, the L929 cells are examined under a microscope for cell nucleus fragmentation, which is a sign of tubulysin action. In the case of cells that did not exhibit cell nucleus fragmentation, the mutants in question were identified as presumable tubulysin knockout mutants. The extracts of those mutants were grown in 50 ml of M7 medium (+1 ml of XAD-16 absorber resin from Rohm & Haas) and the cell nuclei of the L929 cells were, after completion of a toxicity test, additionally tested for cell nucleus fragmentation or tubulysin production by staining of the chromosome by means of DAPI staining.

1.4 Determination of the Integration Gene Site of Tubulysin Knockout Mutants in the An d48 Mariner Mediated Mutant Bank by Means of Transposon Recovery

[0136] In the generated mutant bank it was possible to identify, by means of the toxicity test, five mutants (MutT176, 524, 781, 794 and 929) which produced no tubulysin. It was possible to confirm that result after reculturing the mutants from the long-term culture and re-analysis. In order to obtain information as to the region of the genome in which the Himar1 element is transposed, a transposon recovery was carried out. In this method, the chromosomal DNA of the mutant in question is cut using different restriction enzymes which do not cut within the known magellan4 sequence. The restricted DNA is ligated and, after transformation into DH5α/λpir cells, incubation on kanamycin-containing LB plates is carried out at 37° C. On those plates only those E. coli cells can grow which comprise a plasmid with magellan4 and consequently the Tn5 kanamycin resistance gene. At the ends of the transposon, such a plasmid comprises chromosomal DNA from An d48. These plasmids can replicate in the E. coli cells DH5α/λpir because oriR6K is located within the transposon sequence. The transposon was accordingly isolated from the genome in question and sequenced with the primers K388 and K389. The sequences obtained were then tested against the gene bank for homologies with known genes and, in the process, showed high degrees of similarity with non-ribosomal peptide synthetases (NRPS) from known secondary metabolite biosynthesis gene clusters such as those of myxothiazole, nostopeptolide and saframycin. These analyses gave clear indications that the sequences were sequence fragments from the sought tubulysin gene cluster. By means of restriction analyses and Southern analyses, the size of the individual transposon plasmids and their relative integration sites with respect to one another (within the gene cluster) were determined.

1.4.1. Transposon Recovery

[0137] Isolation of chromosomal DNA according to standard protocols from 50 ml of tryptone medium culture of each A. disciformis An d48 mutant. 5 μg of this DNA are used for the following cloning-out of the transposon, with a restriction first being carried out. In the process, the enzymes NotI and BamHI were used, which have no restriction site within magellan4 and statistically should cut relatively frequently in GC-rich DNA.

Digestion of genomic DNA with NotI and BamHI:

| | |
|---|---|
| | 5 μg of DNA |
| + | 3 μl of 10x NEB buffer |
| + | 3 μl of 100x BSA |
| + | 10 U of restriction enzyme (BamHI or NotI) |
| + | x μl of dist. H₂O |
| | 30 μl batch incubated for 3 h at 37° C. [symbol] again 10 U of |
| | enzyme added to the restriction batches and incubated for a |
| | further 2 h at 37° C. |

Precipitation of the Restricted DNA and Subsequent Ligation

[0138] 1 vol. of chloroform/phenol is added to the entire restriction batch and centrifugation is carried out for 10 min. (13,200 rpm; 20° C.). The supernatant is transferred to a new reaction vessel and 1/10 vol. of 3M NaOAc and 2.5 vol. of 100% EtOH are added. For precipitation of the DNA, the reaction vessel is incubated for 1 h at −20° C. and is then centrifuged for 30 min. (13,200 rpm; 4° C.). The supernatant is discarded and the pellet is washed three times with 70% EtOH, centrifuging each time for 5 min. (13,200 rpm; 20° C.). After discarding the supernatant, the pellet is dried at 37° C. and resuspended in 15 μl of H₂O. For the subsequent ligation, the entire 15 μl of precipitated DNA are used.

Ligation batch:

| | |
|---|---|
| | 15 μl of DNA |
| + | 4 μl of 5x ligase buffer (NEB) |
| + | 1 μl of NEB ligase |
| | 20 μl batch incubated overnight at 16° C. [symbol] 1 μl |
| | of ligase again added to the ligation batches and |
| | incubated overnight at 16° C. |

Electrotransformation of the Ligation Batches into the E. coli Strain DH5α-λpir

[0139] 1-3 μl of the ligation batches and 50 μl of DH5α-λpir cells are mixed and transferred into an electroporation cuvette (0.1 cm) cooled on ice. The electroporation is performed at 200Ω, 25 mF and 1.25 kV/cm. The cells are then suspended in 1 ml of LB medium (10 g of tryptone; 10 g of NaCl; 5 g of yeast extract per 1 litre of medium) and incubated for 1 h at 37° C. They are then plated onto kanamycin-containing (50 μg/ml) LB plates. After incubating for one day at 37° C., the clones can be picked. Only those cells can grow which have a transposon plasmid and accordingly a Tn5-Kan^{R}-mediated resistance.

1.5 Sequence Evaluation of the Tubulysin Biosynthesis Gene Cluster from pMutT794/NotI

[0140] The transposon plasmid pMutT794/NotI comprises 52985 bp chromosomal DNA from Angiococcus disciformis An d48. Together with the Himar1 mini-transposon magellan4 (2199 bp), which is integrated into the plasmid at base pair 37317 bp, 55184 bp were sequenced. In total, 21760 bp originate from coding genes of the tubulysin gene cluster and 31219 bp from further coding genes. These ORFs are, in some cases, regulator genes which can influence the expression of tubulysin. Sequence comparisons with the transposon plasmids of the other tubulysin knockout mutants showed that magellan4 in the case of the mutants MutT781 (36975 bp) and MutT929 (36197 bp) is transposed into the biosynthesis gene cluster within 1658 bp of MutT794.

[0141] In the sequence, the start of the tubulysin gene cluster includes three NRPS modules (tubA-C), a cyclodeaminase-encoding gene (tubZ) and a PKS module (tubD). Also located within the gene cluster are an anion transporter-encoding gene (ORF1), which serves for transporting the tubulysin out of the cell, and a further ORF (ORF2). The basic arrangement of the genes, and of the individual domains with an N-methyltransferase within the adenylation domains (A) of tubB and tubC, corresponds to the typical structure of the gene cluster and the tubulysin biosynthesis associated therewith. However, in contrast to the known gene cluster structures, the methyltransferase domains (NMT) are not located between the adenylation and thiolation domains (PCP) but rather between A8 and A9 within the adenylation domain (A) (highly conserved regions within the adenylation domains of NRPS; Konz & Marahiel, Chem. Biology, 6 (1999) R39-R48). TubA encodes an incomplete condensation domain, which is theoretically not required for biosynthesis. The polyketide synthase (PKS) located at the end of the known sequence comprises a ketoacyl synthase (KS) acyl transferase (AT) and ketoreductase (KR) domain.

[0142] The remaining sequence of the tubulysin biosynthesis gene cluster was identified from a cosmid bank of An d48 (held at the DSMZ) under standard conditions. The PKS module (tubD) ending the first half of the sequence is continued by the afore-mentioned KS, AT and KR domains and furthermore comprises an enoyl reductase (ER) and an acyl carrier protein (ACP). In the following sequence of tubD, an NRPS is encoded which carries a heterocyclisation (HC), adenylation (A) and peptidyl carrier protein (PCP) domain. The genes tubE and tubF also follow. The gene tubE encodes an NRPS with the domains C, A and PCP. On tubF, a PKS having the following domain arrangement is encoded: ketoacyl synthase (KS), acyl transferase (AT), ketoreductase (KR), C-methyltransferase (CMT), dehydratase (DH), enoyl reductase (ER), acyl carrier protein (ACP) and finally a thioesterase which serves for removal of the finished tubulysin in the form of a free acid from the multienzyme complex. The insertion site of the transposon magellan4 is located in the case of MutT176 at base pair 54579 within the biosynthesis gene cluster. The insertion site of the mutant MutT524 is not located on the gene cluster sequence known to us. We therefore postulate that the insertion site is located within an acyl transferase-encoding gene which is located downstream from the tubulysin biosynthesis gene cluster and has a post-translational function for the modification of tubulysin.

2. Identification of the Connection Sequence of the Tubulysin Biosynthesis Gene Cluster from Angiococcus disciformis An d48

2.1 Identification and Characterisation of Cosmids which Carry an Overlapping Sequence Downstream from the Tubulysin Biosynthesis Gene Cluster

[0143] The previous example described how the first half of the tubulysin biosynthesis gene cluster, together with further genes involved in biosynthesis, was identified and annotated by means of mariner-based transposon mutagenesis and subsequent transposon recovery. Because genes encoding both monooxygenases and also acyl transferases are absent within that sequence, a further sequence downstream therefrom had also to be identified and characterised. The afore-mentioned genes should be encoded within that sequence because they are necessary for biosynthesis of tubulysin. The biosynthesis gene cluster should, as a result, be identified in its entirety.

[0144] For the purpose, a cosmid bank was produced from A. disciformis An d48 by means of a Gigapack II XL packaging kit (from Stratagene) in E. coli SURE. Within that bank, cosmids having a relatively long overlap with the tubulysin biosynthesis gene cluster downstream from tubF should be identified. For the purpose, two primer pairs were derived from the known sequence of the tubulysin gene cluster and the PCR amplification products were used as probes for the following hybridisation of the cosmid bank. The first primer pair ASTls1A-1B yields a 889 bp DNA fragment and is located 1 kb upstream from the NotI restriction cutting site in tubD. The second primer pair ASTls2A-2B generates a 700 bp fragment, which is located in tubC 11 kb away upstream in the known cluster end. The PCR was carried out at an annealing temperature of 54° C. As a result of that hybridisation it was possible to identify various cosmids. By means of PCR and restriction analysis, they were examined with respect to the size of their overlap with the known cluster sequence. For the purpose, the primer pairs ASTls1A/B and ASTls2A/B were again used at an annealing temperature of 58° C. In the case of restriction, various enzymes were used in single and double restrictions.

[0145] Because, after the restriction analyses, the cosmids F7 and F13 exhibited a similarly large overlap with the first portion of the cluster, one of these cosmids carries the genetic information necessary to identify the genes directly associated with the cluster.

2.1.1 Southern Analysis of the Cosmids F7 and F13

[0146] For identification of the correct cosmid, restriction enzymes were initially selected which cut as infrequently as possible and at the end of the known gene cluster sequence. The enzymes selected were NdeI and NsiI, which cut at the positions 39306 bp and 39430 bp, respectively. Furthermore, both enzymes cut only once more in the known sequence. Using a generated probe (primer pair Tls_{up/down}), which binds behind those cuts directly at the end of the known cluster sequence, the cosmid gene bank should then be “screened”. For the purpose, the cosmids were hydrolysed in various double restriction batches and separated on an agarose gel (0.8%). For the double restriction, the enzymes BamHI, EcoRI and NotI were selected in addition to NdeI and NsiI. The combinations with EcoRI and NotI were intended to result in a fragment being identified, by means of the hybridisation, which extends to the end of the cosmid insert in question. If that fragment should be too large for subsequent cloning, BamHI was also used in order to obtain, where appropriate, shorter fragments. The hybridisation was carried out at 42° C. and washing was carried out under high-stringency conditions (68° C.).

[0147] The result of this analysis was that a 12 kb fragment was detected in the EcoRI/NdeI restriction batch of the F7 cosmid. This fragment comprises the remaining sequence of the tubulysin gene cluster and extends to the end of the insert sequence of the cosmid. This conclusion was drawn from the restriction analyses and the characterised overlap with the tubulysin gene cluster sequence. The detected NotI/NdeI fragment resulted in a size of 4.2 kb. Therefore, at least one further NotI cutting site must be located within the 12 kb insert sequence of F7—between the start (NdeI—restriction site) and vector (scos). Consequently, the connection sequence can be cloned and sequenced in smaller fragments (as NdeI/NotI and NotI/NotI fragments). The BamHI/NsiI double restriction batch yielded five fragments in total.

2.1.2. Cloning of the Rest of the Tubulysin Gene Cluster Sequence from Cosmid F7

[0148] The cosmid F7 was cut in a double restriction batch using the restriction endonucleases NsiI and EcoRI (2 h; 37° C.). After separation of the restriction batch using 0.8% agarose gel, the corresponding band was cut out of the gel and extracted with the NucleoSpin kit (from Macherei-Nagel). The isolated fragment was re-cut using NotI in order to check whether the hybridisation results achieved were confirmed. In addition, it was checked whether further NotI recognitions sequences are located within the 12 kb connection sequence in order to be able to determine the number of partial fragments to be cloned. After separation on an 0.8% agarose gel, the restriction produced a 4.2 kb fragment (NsiI/NotI fragment) and a 8 kb fragment (NotI/NotI fragment).

[0149] Firstly, the hybridisation result could be confirmed and both fragments could be used for cloning. Secondly, it was confirmed that the fragment is the correct fragment, which carries the sequence downstream from the cluster.

[0150] The 12.2 kb NsiI/EcoRI fragment and also the 4.2 kb (NsiI/NotI) and 8 kb (NotI/NotI) fragments were cloned into the vector pUC18. The vector was cut using PstI/EcoRI or PstI NotI and NotI for the following ligation. PstI and NsiI have a compatible cutting pattern so that, after successful cloning, those cutting sites are no longer present. Using HindIII or NdeI and EcoRI, the 12 kb insert can be cut out again from the pUC18-derivative using a double restriction.

[0151] The clones obtained were checked with respect to their correctness by means of those restriction batches. One of those clones (ASpUC12) was used for a following in vitro transposition by means of the GPS™-1 Genome Priming System (from New England Biolabs_{Inc}).

2.1.3. In Vitro Transposition Using GPS-1™ Genome Priming System

[0152] Using the GPS-1 system, the intention was to sequence the cloned NsiI/NotI fragment by means of an in vitro trans-position based on Tn7. This “kit” uses a TnsABC transposase, which randomly inserts the transposon (Transprimer™) into the target sequence. By means of specific sequencing primers (PrimerN/PrimerS), which can be “read out” at the flanking ends of the transposon, the adjacent regions of the DNA insert can be sequenced. Because the transposon is randomly inserted into the target sequence, the entire target sequence can be characterised by sequencing a certain number of generated transposon mutants.

Procedure for in vitro transposition

| | |
|---|---|
| | 2 μl of 10x GPS buffer |
| + | 1 μl of pGPS 1.1 (provides Kan^{R}) |
| + | 0.2 μl of target DNA (corresponds to 80 ng of ASexp7) |
| + | 14.8 μl of dH₂O |
| | 18 μl batch |

[0153] The batch is mixed well and 1 μl of TnsABC transposase is added (again mixing well). The entire reaction batch is incubated for 10 min. at 37° C. so that the transposase mixes in the reaction batch before the actual reaction. After the addition of 1 μl of “start solution”, the reaction batch is incubated for one hour at 37° C. During that period, the strand transfer of the transposon into the target DNA occurs. The reaction is then terminated by incubation for 10 min. at 75° C. From that batch, 2 μl were transformed into E. coli DH10B and plated onto kanamycin-containing medium. A total of about 2000 clones have grown after incubation overnight at 37° C.

[0154] 20 of those clones were examined with regard to the ratio in which the transposon has been inserted into the insert or vector. For the purpose, those clones were hydrolysed in a double restriction batch using the endonucleases EcoRI and HindIII. The restriction analysis showed that, in the case of 75% of the clones, the transposon had been inserted into the insert. Consequently, 192 clones were sequenced, as a result of which an approximately 12-fold coverage of the sequence was achieved (in the case of a read length of 500 bp per sequencing).

2.2 Sequence Analysis and Annotation of the 12 kb Connection Sequence

[0155] The remaining sequence obtained for the tubulysin biosynthesis gene cluster is 12,219 bp long and has an overlap with the previously identified sequence of 133 bp. Sequence portions which had been covered only once were subjected to double-strand-sequencing by repeated sequencing of specific clones. In this sequence, an acyl transferase is encoded by base pair 6416-6898 (position 76,787-77,545 bp in the overall sequence). The other identified ORFs likewise have a function in tubulysin biosynthesis. The entire sequence is accordingly 82,868 bp.

3. Identification of a Tubulysin-Overproducing Mutant within the Mariner Transposon Mutant Bank

[0156] In order to investigate the mutants of the transposon bank with regard to further noteworthy phenotypes compared to the wild type, an HPLC analysis was carried out. In the process it was checked whether insertion of the transposon into chromosomal regions of biosynthesis gene clusters of other expressed secondary substances had occurred. In those comparisons with respect to an extract of the wild type, non-producing mutants of the metabolites in question should then be identified. Those metabolites include myxothiazole (Gerth et al. 1980 J Antibiot (Tokyo) 33(12):1474-1479 and Silakowski et al. 1999 J Biol. Chem. 274(52):37391-9, myxochelin (Gerth et al. 1983 J Antibiot (Tokyo) 36(9):1150-6. and Silakowski et al. 2000 Eur J. Biochem. 267(21):6476-85) and angiolam (Kunze et al. 1985, J Antibiot (Tokyo) 38(12):1649-54).

[0157] In evaluations of the 1,200 HPLC runs, extracts of a number of mutants were noted in which increased myxothiazole production could be measured. In order to check the results obtained, 50 ml M7 medium cultures of the mutants in question were tested again and time kinetics were produced for myxothiazole production over several days compared to the wild type. The results of those tests showed clearly increased production of myxothiazole in the various mutants compared to the An d48 wild type.

[0158] Determination of the transposon insertion site within the mutant in question was carried out by means of “transposon recovery” and subsequent sequencing of the flanking regions (see 1.4). The sequences obtained were investigated for homologies with known genes and showed high degrees of similarity with regard to regulatory elements/genes from bacterial organisms. On the basis of those results, the entire mutant bank was investigated for tubulysin-overproducing mutants. For the purpose, the existing toxicity test (see 1.3) was optimised. As a result of multiple dilutions of the respective mutant extract used in the toxicity test, a dilution of the tubulysin is achieved and consequently the characteristic action on L929 cells is no longer detectable from a certain dilution. Using those dilution series (from the entire mutant bank), mutants were identified where significantly higher dilutions are required in order not to be able to detect any action. This means that the mutant in question exhibits increased tubulysin production.

[0159] It was possible to identify mutant Mut158, which exhibited a four-fold increase in tubulysin D production. This result was shown both by culture of the mutant in 50 ml cultures by way of HPLC-MS tests, and also a number of kinetics with a subsequent optimised toxicity test against the wild type. By means of the toxicity test, even eight-fold overproduction of tubulysins was established, in which case the overall action of all tubulysin derivatives was detected and not only that of tubulysin D. Mutant 158 consequently exhibits, entirely surprisingly, overexpression of further tubulysins compared to the wild type of A. disciformis. On no account was this to be expected. Cloning-out of the genomic region directly at the insertion site of the transposon and sequencing were carried out as described under 1.4.

[0160] The sequence of the gene concerned shows high degrees of similarity with a protein kinase (from Stigmatella aurantiaca), the insertion site of the transposon constituting the promoter region of this gene. Without being bound to this mechanism of action, this gene has a negative regulatory function for tubulysin formation, which is why inactivation of the gene results in increased production. The entire sequence comprises 2,200 bp, the protein kinase being encoded by base pair 1,228-20 and having a total size of 1,209 bp. The ORF located upstream encodes a tubulysin biosynthesis protein and has a size of 933 bp.

Primer Sequences:

[0161] Sequencing primer for the Himar1 mini-transposon magellan4

SEQ ID NO: 39

| | | |
|---|---|---|
| K-388: | 5′→3′ | ^{5′}TGG GAA TCA TTT GAA GGT TGG^{3′} |

SEQ ID NO: 40

| | | |
|---|---|---|
| K-389: | 3′→5′ | ^{5′}TGT GTT TTT CTT TGT TAG ACC G^{3′} |

[0162] Primer pair ASTls1A/B was derived from tubD and produces an 889 bp fragment

| | |
|---|---|
| AST1s1A | |
| ^{5′}CAC CCG GAC CTG CCT GGA TTC^{3′} | SEQ ID NO: 41 |
| AST1s1B | |
| ^{5′}TGC TCG GCT GGC GCT ACT CAC^{3′} | SEQ ID NO: 42 |

[0163] Primer pair ASTls2A/B was derived from tubC and produces a 700 bp fragment

| | |
|---|---|
| AST1s2A | |
| ^{5′}GCT CCC GGG CCA CGT GGT TGA AGA^{3′} | SEQ ID NO: 43 |
| AST1s2B | |
| ^{5′}CCG CGG GCC GTG GCA GTG GTG TA^{3′} | SEQ ID NO: 44 |

[0164] Primer pair Tlsᵤₚ/Tls_{down} was derived from tubF and produces a 125 bp fragment

| | | |
|---|---|---|
| T1sᵤₚ | ^{5′}TGG CAG CCA GCC CGA GC^{3′} | SEQ ID NO: 45 |
| T1s_{down} | ^{5′}CCG CGG GTG CCC TCT CAT C^{3′} | SEQ ID NO: 46 |

[0165]

| Name of gene (whether | | | | | Classification of domain | |
|---|---|---|---|---|---|---|
| PKS or NRPS) | | | | | and position in | |
| Function | Coding region | Coding region on the | Size in bp | | nucleotide sequence or | |
| SEQ ID NO of amino acid | in sequence | minus strand | Size of derived/translated | | protein of greatest | |
| sequence | (SEQ ID NO:) | (SEQ ID NO:) | protein in Da | | similarity | |
| ORF16: | 3,308-1 | 79,561-82,866 | 3,308 | bp | 49% identity, 64% | |
| Valyl-tRNA-synthase | (SEQ ID NO: 1) | (SEQ ID NO: 18) | 122,434 | Da | similarity to Valyl-tRNA | |
| SEQ ID NO: 32 | | | | | synthetase [Thermotoga | |
| | | | | | maritima] | |
| | | | | | NP_229614 | |
| ORF15: | 4,706-3,453 | 78,163-79,416 | 1,254 | bp | 38% identity, 61% | |
| Regulatory component of a | (SEQ ID NO: 1) | (SEQ ID NO: 18) | 41,337 | Da | similarity to “response” | |
| sensory transduction system | | | | | regulator CheY sub- | |
| SEQ ID NO: 31 | | | | | family [Synechocystis sp.] | |
| | | | | | NP_440346 | |
| ORF14: | 5,719-7,164 | | 1,446 | bp | 29% identity, 44% | |
| Two-component “response” | (SEQ ID NO: 1) | | 52,449 | Da | similarity to “response” | |
| regulator | | | | | regulator protein | |
| SEQ ID NO: 2 | | | | | [Mesorhizobium loti] | |
| | | | | | NP_102571 | |
| ORF13: | 9,557-7,317 | 73,312-75,552 | 2,241 | bp | 29% identity, 46% | |
| Two-component regulation | (SEQ ID NO: 1) | (SEQ ID NO: 18) | 83,814 | Da | similarity to two- | |
| system comprising sensor | | | | | component regulation | |
| kinase/“response” regulator | | | | | system of sensor kinase/ | |
| hybrid | | | | | “response” regulator | |
| SEQ ID NO: 30 | | | | | hybrid [Agrobacterium | |
| | | | | | tumefaciens] | |
| | | | | | NP_535879 | |
| ORF12: | 12,193-10,550 | 70,676-72,319 | 1,644 | bp | 70% identity, 85% similarity | |
| Heat shock protein | (SEQ ID NO: 1) | (SEQ ID NO: 18) | 58,650 | Da | to heat shock protein GroEL | |
| SEQ ID NO: 29 | | | | | [Rhodothermus marinus] | |
| | | | | | AAD37976 | |
| ORF11: | 12,841-13,881 | | 1,041 | bp | 34% identity, 56% similarity | |
| Tubulysin biosynthesis | (SEQ ID NO: 1) | | 37,818 | Da | to hypothetical protein | |
| protein | | | | | [Corynebacterium | |
| SEQ ID NO: 3 | | | | | glutamicum] | |
| | | | | | NP_616546 | |
| ORF10: | 14,833-13,835 | 68,036-69,034 | 999 | bp | 33% identity, 47% similarity | |
| Tubulysin biosynthesis | (SEQ ID NO: 1) | (SEQ ID NO: 18) | 36,441 | Da | to conserved hypothetical | |
| protein | | | | | protein [Streptomyces | |
| SEQ ID NO: 28 | | | | | coelicolor] | |
| | | | | | NP_631315 | |
| ORF9: | 14,942-15,586 | | 645 | bp | 30% identity, 51% similarity | |
| Transcription regulator | (SEQ ID NO: 1) | | 23,789 | Da | to transcription regulator, | |
| SEQ ID NO: 4 | | | | | TetR family [Caulobacter | |
| | | | | | crescentus] | |
| | | | | | NP_420005 | |
| ORF8: | 15,847-16,983 | | 1137 | bp | 24% identity, 40% similarity | |
| Integrase | (SEQ ID NO: 1) | | 41,614 | Da | to integrase | |
| SEQ ID NO: 5 | | | | | [Corynebacterium | |
| | | | | | glutamicum] | |
| | | | | | NP_601233 | |
| ORF7: | 21,154-18,809 | 61,715-64,016 | 2,346 | bp | 33% identity, 47% similarity | |
| Tubulysin biosynthesis | (SEQ ID NO: 1) | (SEQ ID NO: 18) | 89,255 | Da | to hypothetical protein | |
| protein | | | | | [Nostoc sp.] | |
| SEQ ID NO: 27 | | | | | NP_490333 | |
| ORF6: | 22,366-23,532 | | 1,167 | bp | 32% identity, 46% similarity | |
| Serine/threonine-kinase | (SEQ ID NO: 1) | | 43,228 | Da | to serine/threonine-kinase | |
| SEQ ID NO: 6 | | | | | Pkn14 [Myxococcus xanthus] | |
| | | | | | AAK64427 | |
| ORF5: | 24,591-26,513 | | 1,923 | bp | 42% identity, 56% similarity | |
| Protein kinase | (SEQ ID NO: 1) | | 68,825 | Da | to protein kinase [Stigmatella | |
| SEQ ID NO: 7 | | | | | aurantiaca] | |
| | | | | | CAD19078 | |
| ORF4: | 26,597-27,517 | | 921 | bp | 33% identity, 37% similarity | |
| Adenine deaminase | (SEQ ID NO: 1) | | 33,507 | Da | to adenine deaminase-related | |
| SEQ ID NO: 8 | | | | | protein [Deinococcus | |
| | | | | | radiodurans] | |
| | | | | | NP_285591 | |
| ORF3: | 29,858-30,400 | | 543 | bp | 24% identity, 41% similarity | |
| Cytosine deaminase | (SEQ ID NO: 1) | | 20,880 | Da | to possible cytosine | |
| SEQ ID NO: 9 | | | | | deaminase [Salmonella | |
| | | | | | typhimurium] | |
| | | | | | NP_462244 | |
| tubA | 31,220-32,392 | | 1,173 | bp | similarity to C-domain core | |
| SEQ ID NO: 10 | (SEQ ID NO: 1) | | 43,202 | Da | motifs C2-C3 | |
| ORF2 | 33,056-32,397 | 49,813-50,472 | 660 | bp | 29% identity, 42% similarity | |
| Tubulysin biosynthesis | (SEQ ID NO: 1) | (SEQ ID NO: 18) | 25,390 | Da | to conserved hypothetical | |
| protein | | | | | protein [Neurospora crassa] | |
| SEQ ID NO: 26 | | | | | CAD11370 | |
| tubZ | 34,195-33,074 | 48,674-49,795 | 1,122 | bp | 39% identity, 53% similarity | |
| Lysine cyclodeaminase | (SEQ ID NO: 1) | (SEQ ID NO: 18) | 40,499 | Da | to lysine cyclodeaminase | |
| “pipicolinic acid | | | | | [Streptomyces hygroscopicus] | |
| synthase” | | | | | CAA60467 | |
| SEQ ID NO: 25 | | | | | | |
| ORF1 | 35,422-34,205 | 47,447-48,664 | 1,218 | bp | 40% identity, 65% similarity | |
| ATP-dependent anion | (SEQ ID NO: 1) | (SEQ ID NO: 18) | 46,030 | Da | to anion-transporting ATPase | |
| transporter | | | | | [Aquifex aeolicus] | |
| SEQ ID NO: 24 | | | | | NP_213468 | |
| tubB | 35,522-40,147 | | 4,626 | bp | C 35,747-36,769 | 76-416 |
| SEQ ID NO: 11 | (SEQ ID NO: 1) | | 170,704 | Da | A 37,184-39,817 | 555-1,432 |
| | | | | | NMT 38,369-39,730 in | 950-1,403 |
| | | | | | A domain between core motif | |
| | | | | | A8 and A9 | |
| | | | | | PCP 39,818-40,069 | 1,433-1,516 |
| tubC | 40,144-48,021 | | 7,878 | bp | C 40,372-41,397 | 77-418 |
| SEQ ID NO: 34 | (SEQ ID NO: 1) | | 289,141 | Da | A 41,824-43,215 | 561-1,024 |
| | 1-7,878 | | | | PCP 43,216-43,461 | 1,025-1,106 |
| | (SEQ ID NO: 33) | | | | C 43,552-44,574 | 1,137-1,477 |
| | | | | | A 44,980-47,631 | 1,613-2,496 |
| | | | | | NMT 46,153-47,547 in A | 2,004-2,468 |
| | | | | | domain between core motif | |
| | | | | | A8 and A9 | |
| | | | | | PCP 47,632-47,868 | 2,497-2,575 |
| tubD | 48,011-58,558 | | 10,548 | bp | KS 48,011-49,321 | 1-437 |
| SEQ ID NO: 12 | (SEQ ID NO: 1) | | 383,778 | Da | AT 49,622-50,584 | 538-858 |
| | | | | | KR 51,473-52,309 | 1,155-1,433 |
| | | | | | ER 53,066-53,980 | 1,686-1,990 |
| | | | | | ACP 54,158-54,460 | 2,050-2,150 |
| | | | | | HC 54,461-55,870 | 2,151-2,620 |
| | | | | | A 56,000-57,412 | 2,664-3,134 |
| | | | | | PCP 57,413-57,643 | 3,135-3,211 |
| tubE | 58,551-62,096 | | 3,546 | bp | C 58,689-59,714 | 47-388 |
| SEQ ID NO: 35 | (SEQ ID NO: 1) | | 130,337 | Da | A 60,156-61,697 | 536-1,049 |
| | 18.408-21.953 | | | | PCP 61,698-61,967 | 1,050-1,139 |
| | (SEQ ID NO: 33) | | | | | |
| tubF | 62,103-70,616 | | 8,514 | bp | KS 62,127-63,320 | 9-406 |
| SEQ ID NO: 13 | (SEQ ID NO: 1) | | 309,369 | Da | AT 63,711-64,676 | 537-858 |
| | | | | | KR 64,959-65,882 | 953-1,260 |
| | | | | | CMT 65,985-67,061 | 1,295-1,653 |
| | | | | | DH 67,242-67,829 | 1,714-1,909 |
| | | | | | ER 68,247-69,128 | 2,049-2,342 |
| | | | | | PCP 69,360-69,605 | 2,420-2,501 |
| | | | | | TE 69,759-70,586 | 2,553-2,828 |
| ORF17: | 71,640-70,583 | 11,229-12,284 | 1,056 | bp | 24% identity, 40% similarity | |
| similarity to patatin- | (SEQ ID NO: 1) | (SEQ ID NO: 18) | 38,371 | Da | to patatin-similar protein | |
| similar protein (lipid | | | | | [Anabaena sp. 90] | |
| acylhydrolase) | | | | | CAC01602 | |
| SEQ ID NO: 23 | | | | | | |
| ORF18: | 72,786-71,731 | 10,083-11,138 | 1,056 | bp | 24% identity, 40% similarity | |
| similarity to patatin- | (SEQ ID NO: 1) | (SEQ ID NO: 18) | 38,371 | Da | to patatin-similar protein | |
| similar protein (lipid | | | | | [Anabaena sp.90] | |
| acylhydrolase) | | | | | CAC01602 | |
| SEQ ID NO: 22 | | | | | | |
| ORF19: | 75,209-74,655 | 7,660-8,214 | 555 | bp | 31% identity, 43% similarity | |
| Tubulysin biosynthesis | (SEQ ID NO: 1) | (SEQ ID NO: 18) | 20,040 | Da | to hypothetical protein | |
| protein | | | | | [Azotobacter vinelandii] | |
| SEQ ID NO: 21 | | | | | ZP_00092207 | |
| ORF20: | 75,488-76,645 | | 1,158 | bp | 41% identity, 62% similarity | |
| Tubulysin biosynthesis | (SEQ ID NO: 1) | | 43,282 | Da | to hypothetical protein | |
| protein | | | | | [Microbulbifer degradans] | |
| SEQ ID NO: 14 | | | | | ZP_00065421 | |
| tubG: | 76,787-77,545 | | 759 | bp | 47% identity, 53% similarity | |
| Acyltransferase | (SEQ ID NO: 1) | | 28,039 | Da | to N-hydroxyarylamine O- | |
| SEQ ID NO: 15 | | | | | acetyltransferase | |
| | | | | | [Streptomyces avermitilis] | |
| | | | | | NP_826733 | |
| ORF21: | 77,769-78,695 | | 927 | bp | 28% identity, 39% similarity | |
| Tubulysin biosynthesis | (SEQ ID NO: 1) | | 33,859 | Da | to conserved hypothetical | |
| protein | | | | | protein [Xanthomonas | |
| SEQ ID NO: 16 | | | | | axonopodis] | |
| | | | | | NP_641500 | |
| ORF22: | 79,138-80,019 | | 882 | bp | 37% identity, 49% similarity | |
| Tubulysin biosynthesis | (SEQ ID NO: 1) | | 32,668 | Da | to hypothetical protein | |
| protein | | | | | [Rhizobium etli] | |
| SEQ ID NO: 17 | | | | | NP_659913 | |
| ORF23: | 81,319-80,057 | 1,550-2,812 | 1,263 | bp | 34% identity, 52% similarity | |
| Tubulysin biosynthesis | (SEQ ID NO: 1) | (SEQ ID NO: 18) | 49,133 | bp | to hypothetical protein | |
| protein | | | | | [Nostoc punctiforme] | |
| SEQ ID NO: 20 | | | | | ZP_00109292 | |
| ORF24: | 82,797-81,721 | 72-1,148 | 1,077 | bp | 31% identity, 44% similarity | |
| Carboxylate reductase | (SEQ ID NO: 1) | (SEQ ID NO: 18) | 37,621 | Da | to pyrroline-carboxylate | |
| SEQ ID NO: 19 | | | | | reductase NosF | |
| | | | | | [Nostoc sp.] | |
| | | | | | AAF17284 | |
| ORF25: | 1,228-20 | 973-2181 | 1,209 | bp | Tubulysin-overproducing | |
| Protein kinase | | (SEQ ID NO: 36) | 44,079 | Da | mutant | |
| SEQ ID NO: 38 | | | | | | |
| ORF26: | 2,157-1,225 | 44-976 | 933 | bp | Tubulysin-overproducing | |
| Tubulysin biosynthesis | | (SEQ ID NO: 36) | 33,229 | Da | mutant | |
| protein | | | | | | |
| SEQ ID NO: 37 | | | | | | |

KS: ketoacyl synthase
AT: acyl transferase
KR: ketoreductase
DH: dehydratase
ER: enoyl reductase
ACP: acyl carrier protein
CMT: C-methyltransferase
NMT: N-methyltransferase
A: adenylation domain
C: condensation domain
PCP: peptidyl carrier protein
TE: thioesterase
bp: base pairs
Da: dalton

1. An ssDNA molecule selected from the following group:
(i) an ssDNA molecule having a sequence according to FIG. 1;
(ii) an ssDNA molecule which is 90, 91, 92, 93, 94, 95, 96, 97, 98, 99, or 100% homologous to an ssDNA molecule according to (i) in respect of its number of nucleotides or its nucleotide sequence but which differs by at least one nucleotide from the ssDNA molecule according to (i) in respect of its number of nucleotides and/or its nucleotide sequence; and
(iii) an ssDNA molecule having a sequence which is complementary to the sequence of an ssDNA molecule according to (i) or (ii).

2. A dsDNA molecule comprising an ssDNA molecule according to claim 1 and a strand complemetary thereto.

3. An ssDNA molecule selected from the following group:
(i) am ssDNA molecule having a sequence of positions 3.308 to 1 (ORF 16) of the sequence according to FIG. 1;
(ii) an ssDNA molecule having a sequence of positions 4706 to 3453 (ORF 15) of the sequence according to FIG. 1;
(iii) an ssDNA molecule having a sequence of positions 5719 to 7164 (ORF 14) of the sequence according to FIG. 1;
(iv) an ssDNA molecule having a sequence of positions 9557 to 7317 (ORF 13) of the sequence according to FIG. 1;
(v) an ssDNA molecule having a sequence of positions 12193 to 10550 (ORF 12) of the sequence according to FIG. 1;
(vi) an ssDNA molecule having a sequence of positions 12841 to 13881 (ORF 11) of the sequence according to FIG. 1;
(vii) an ssDNA molecule having a sequence of positions 14833 to 13835 (ORF 10) of the sequence according to FIG. 1;
(viii) an ssDNA molecule having a sequence of positions 14942 to 15586 (ORF 9) of the sequence according to FIG. 1;
(ix) an ssDNA molecule having a sequence of positions 15847 to 16983 (ORF 8) of the sequence according to FIG. 1;
(x) an ssDNA molecule having a sequence of positions 21154 to 18809 (ORF 7) of the sequence according to FIG. 1;
(xi) an ssDNA molecule having a sequence of positions 22366 to 23532 (ORF 6) of the sequence according to FIG. 1;
(xii) an ssDNA molecule having a sequence of positions 24591 to 26513 (ORF 5) of the sequence according to FIG. 1;
(xiii) an ssDNA molecule having a sequence of positions 26597 to 27517 (ORF 4) of the sequence according to FIG. 1;
(xiv) an ssDNA molecule having a sequence of positions 29858 to 30400 (ORF 3) of the sequence according to FIG. 1;
(xv) an ssDNA molecule having a sequence of positions 31220 to 32392 (TubA) of the sequence according to FIG. 1;
(xvi) an ssDNA molecule having a sequence of positions 33056 to 32397 (ORF 2) of the sequence according to FIG. 1;
(xvii) an ssDNA molecule having a sequence of positions 34195 to 33074 (TubZ) of the sequence according to FIG. 1;
(xviii) an ssDNA molecule having a sequence of positions 35422 to 34205 (ORF 1) of the sequence according to FIG. 1;
(xix) an ssDNA molecule having a sequence of positions 35522 to 40147 (TubB) of the sequence according to FIG. 1;
(xx) an ssDNA molecule having a sequence of positions 40144 to 48021 (TubC) of the sequence according to FIG. 1;
(xxi) an ssDNA molecule having a sequence of positions 48011 to 58558 (TubD) of the sequence according to FIG. 1;
(xxii) an ssDNA molecule having a sequence of positions 58551 to 62096 (TubE) of the sequence according to FIG. 1;
(xxiii) an ssDNA molecule having a sequence of positions 62103 to 70616 (TubF) of the sequence according to FIG. 1;
(xxiv) an ssDNA molecule which is hybridisable with a molecule according to (i), (ii), (iii), (iv), (v), (vi), (vii), (viii), (ix), (x), (xi), (xii), (xiii), (xiv), (xv), (xvi), (xvii), (xviii), (xix), (xx), (xxi), (xxii), or (xxiii) under stringent conditions and especially has the same number of bases; and;
(xxv) an ssDNA molecule which is 90, 91, 92, 93, 94, 95, 96, 97, 98, 99, or 100% homologous to an ssDNA molecule according to (i), (ii), (iii), (iv), (v), (vi), (vii), (viii), (ix), (x), (xi), (xii), (xiii), (xiv), (xv), (xvi), (xvii), (xviii), (xix), (xx), (xxi), (xxii), or (xxiii) in respect of its number of nucleotides or its nucleotide sequence but which differs by at least on nucleotide from that ssDNA molecule in respect of its number of nucleotides and/or its nucleotide sequence; and
(xxvi) an ssDNA molecule having a sequence which is complementary to the sequence of a molecule according to (i), (ii), (iii), (iv), (v), (vi), (vii), (viii), (ix), (x), (xi), (xii), (xiii), (xiv), (xv), (xvi), (xvii), (xviii), (xix), (xx), (xxi), (xxii), (xxiii), (xxiv) or (xxv).

4. A dsDNA molecule comprising and ssDNA molecule according to claim 3 and a strand complemtary thereto.

5. An ssDNA molecule selected from the following group:
(i) an ssDNA molecule having a sequence of positions 35747 to 36769 (domain C of the tubB gene) of the sequence according to FIG. 1;
(ii) an ssDNA molecule having a sequence of positions 37184 to 39817 (domain A of the tubB gene) of the sequence according to FIG. 1;
(iii) an ssDNA molecule having a sequence of positions 38369 to 39730 (domain NMT of the tubB gene) of the sequence according to FIG. 1;
(iv) an ssDNA molecule having a sequence of positions 39818 to 40069 (domain PCP of the tubB gene) of the sequence according to FIG. 1;
(v) an ssDNA molecule having a sequence of positions 40372 to 41397 (domain C of the tubC gene) of the sequence according to FIG. 1;
(vi) an ssDNA molecule having a sequence of positions 41824 to 43215 (domain PCP of the tubC gene) of the sequence according to FIG. 1;
(vii) an ssDNA molecule having a sequence of positions 43216 to 43461 (domain PCP of the tubC gene) of the sequence according to FIG. 1;
(viii) an ssDNA molecule having a sequence of positions 43552 to 44574 (domain C of the tubC gene) of the sequence according to FIG. 1;
(ix) an ssDNA molecule having a sequence of positions 44980 to 47631 (domain A of the tubC gene) of the sequence according to FIG. 1;
(x) an ssDNA molecule having a sequence of positions 46153 to 47547 (domain NMT of the tubC gene) of the sequence according to FIG. 1;
(xi) an ssDNA molecule having a sequence of positions 47632 to 47868 (domain PCP of the tubC gene) of the sequence according to FIG. 1;
(xii) an ssDNA molecule having a sequence of positions 48011 to 49321 (domain KS of the tubD gene) of the sequence according to FIG. 1;
(xiii) an ssDNA molecule having a sequence of positions 49622 to 50584 (domain AT of the tubD gene) of the sequence according to FIG. 1;
(xiv) an ssDNA molecule having a sequence of positions 51473 to 52309 (domain KR of the tubD gene) of the sequence according to FIG. 1;
(xv) an ssDNA molecule having a sequence of positions 53066 to 53980 (domain ER of the tubD gene) of the sequence according to FIG. 1;
(xvi) an ssDNA molecule having a sequence of positions 54158 to 54460 (domain ACP of the tubD gene) of the sequence according to FIG. 1;
(xvii) an ssDNA molecule having a sequence of positions 54461 to 55870 (domain HC of the tubD gene) of the sequence according to FIG. 1;
(xviii) an ssDNA molecule having a sequence of positions 56000 to 57412 (domain A of the tubD gene) of the sequence according to FIG. 1;
(xix) an ssDNA molecule having a sequence of positions 57413 to 57643 (domain PCP of the tubD gene) of the sequence according to FIG. 1;
(xx) an ssDNA molecule having a sequence of positions 58689 to 59714 (domain C of the tubE gene) of the sequence according to FIG. 1;
(xxi) an ssDNA molecule having a sequence of positions 60156 to 61697 (domain A of the tubE gene) of the sequence according to FIG. 1;
(xxii) an ssDNA molecule having a sequence of positions 61698 to 61967 (domain PCP of the tubE gene) of the sequence according to FIG. 1;
(xxiii) an ssDNA molecule having a sequence of positions 62127 to 63320 (domain KS of the tubF gene) of the sequence according to FIG. 1;
(xxiv) an ssDNA molecule having a sequence of positions 63711 to 64676 (domain AT of the tubF gene) of the sequence according to FIG. 1;
(xxv) an ssDNA molecule having a sequence of positions 64959 to 65882 (domain KR of the tubF gene) of the sequence according to FIG. 1;
(xxvi) an ssDNA molecule having a sequence of positions 65985 to 67061 (domain CMT of the tubF gene) of the sequence according to FIG. 1;
(xxvii) an ssDNA molecule having a sequence of positions 67242 to 67829 (domain DH of the tubF gene) of the sequence according to FIG. 1;
(xxviii) an ssDNA molecule having a sequence of positions 68247 to 69128 (domain ER of the tubF gene) of the sequence according to FIG. 1;
(xxix) an ssDNA molecule having a sequence of positions 69360 to 69605 (domain PCP of the tubF gene) of the sequence according to FIG. 1;
(xxx) an ssDNA molecule having a sequence of positions 69759 to 70586 (domain TE of the tubF gene) of the sequence according to FIG. 1;
(xxxi) an ssDNA molecule which is hybridisable with a molecule according to (i), (ii), (iii), (iv), (v), (vi), (vii), (viii), (ix), (x), (xi), (xii), (xiii), (xiv), (xv), (xvi), (xvii), (xviii), (xix), (xx), (xxi), (xxii), (xxiii), (xxiv), (xxv), (xxvi), (xxvii), (xxviii), (xxix) or (xxx) under stringent conditions and especially has the same number of bases;
(xxxii) an ssDNA molecule which is 90, 91, 92, 93, 94, 95, 96, 97, 98, 99, or 100% homologous to an ssDNA molecule according to (i), (ii), (iii), (iv), (v), (vi), (vii), (viii), (ix), (x), (xi), (xii), (xiii), (xiv), (xv), (xvi), (xvii), (xviii), (xix), (xx), (xxi), (xxii), (xxiii), (xxiv), (xxv), (xxvi), (xxvii), (xxviii), (xxix) or (xxx) in respect of its number of nucleotides or its nucleotide sequence but which differs by at least one nucleotide from that ssDNA molecule in respect of its number of nucleotides and/or its nucleotide sequence; and
(xxxiii) an ssDNA molecule having a sequence which is complementary to the sequence of a molecule according to (i), (ii), (iii), (iv), (v), (vi), (vii), (viii), (ix), (x), (xi), (xii), (xiii), (xiv), (xv), (xvi), (xvii), (xviii), (xix), (xx), (xxi), (xxii), (xxiii), (xxiv), (xxv), (xxvi), (xxvii), (xxviii), (xxix), (xxx), (xxxi) or (xxxii).

6. A dsDNA molecule comprising an ssDNA molecule according to claim 5 and a strand complementary thereto.

7. Variants or mutants which result from a substitution, insertion or deletion of nucleotides or from an inversion of nucleotide segments of an ssDNA molecule according to claim 1, those variants and mutants encoding enzyme variants or enzyme mutants for the production of secondary substance(s) having properties characteristic of tubulysins.

8. RNA
(a) having a sequence corresponding to that of an ssDNA molecule according to claim 1 or
(b) having a sequence of an RNA according to (a) but in the opposite direction (anti-sense), or
(c) having a sequence of an RNA according to (a) or (b) and having a strand complementary thereto, in each case optionally as an element of a recombinant vector.

9. A vector, especially an expression vector, having a DNA molecule according to claim 1.

10. A cell, especially for expression, into which a DNA molecule or a vector according to claim 8 has been integrated.

11. A cell according to claim 10, the cell being derived from culturable bacteria, especially Myxobacteria, preferably Angiococcus, especially A. disciformis, Archangium, especially A. gephyra, Escherichia coli, pseudomonads or actinomycetes.

12. Use of a vector according to claim 8 for the transformation of cells of organisms for the transient or permanent expression of one or more proteins (expression product(s) which is/are encoded by a DNA (ssDNA or dsDNA) of the vector).

13. Use of a cell according to claim 10 for the enzymatic biosynthesis, metasynthesis or partial synthesis of a tubulysin, especially tubulysin A, B, C, D, E and/or F.

14. An expression product of a DNA molecule according to claim 1.

15. A polynucleotide comprising a sequence as defined in SEQ ID NO: 1, 18, 33 or 36, or a fragment thereof.

16. A polynucleotide according to claim 15, wherein the fragment is a CDS defined in the sequence protocol.

17. A vector comprising a polynucleotide according to claim 15.

18. A cell comprising a vector according to claim 17.

19. A polypeptide comprising at least one sequence as defined in SEQ ID NO: 2 to 17, 19 to 32, 34, 35, 37 and/or 38 and/or a fragment and/or derivative thereof.

20. Use of at least one polynucleotide as defined in SEQ ID NO: 1, 18, 33 and/or 36 and/or at least one fragment thereof and/or at least one polypeptide as defined in SEQ ID NO: 2 to 17, 19 to 32, 34, 35, 37 and/or 38 and/or at lease one fragment thereof in the production of a pharmaceutical composition for the treatment of undesirable cell growth or undesirable cell proliferation in an individual.

21. Use according to claim 20, wherein the undesirable cell growth or undesirable cell proliferation is a tumour.

22. Use according to claim 20, wherein the undesirable cell growth or undesirable cell growth is a pathogenic infection.

23. Use according to claim 22, wherein the pathogenic infection is a mycosis, malaria, or a parasitic disease.

24. A pharmaceutical composition comprising at least one polynucleotide as defined in SEQ ID NO: 1, 18, 33 and/or 36 and/or at least one fragment thereof and/or at least one polypeptide as defined in SEQ ID NO: 2 to 17, 19 to 32, 34, 35, 37 and/or 38 and/or at least one fragment thereof.

25. A pharmaceutical composition according to claim 24, which further comprises at least one pharmaceutically acceptable carrier.

26. A method of producing tubulysins and tubulysin biosynthesis proteins, comprising the steps:
(a) expression of at least one polynucleotide as defined in SEQ ID NO: 1, 18, 33 and/or 36 and/or at least one fragment thereof and/or at least one polypeptide as defined in SEQ ID NO: 2 to 17, 19 to 32, 34, 35, 37 and/or 38 and/or at least one fragment thereof, and
(b) purification of the expression products.

27. A method according to claim 26, wherein expression is carried out in prokaryotic or eukaryotic cells and/or by in vitro expression.

28. A method of finding genes which are involved in the biosynthesis of tubulysins, comprising the steps:
(a) hybridization of at least one polynucleotide as defined in SEQ ID NO: 1, 18, 33 and/or 36 and/or at least one fragment therof with DNA, RNA and/or cDNA of a species that is not identical to Angiococcus disciformis, and
(b) isolation and characterization of the hybridized DNA, RNA and/or cDNA.

29. A kit for the production of tubulysins, comprising:
(a) at least one polynucleotide according to claim 15 or
(b) suitable media and buffers for the multiplication of cells which allow expression of the polynucleotide and/or vector and
(c) suitable means for purification of the expression product(s).

30. Use of a composition comprising at least one polypeptide as defined in SEQ ID NO: 2 to 17, 19 to 32, 34, 35, 37 and/or 38 and/or at least one biologically active fragment or derivative thereof as a disinfectant.

31. Use according to claim 30, wherein the composition is liquid or in powder form.

32. A disinfectant as defined in claim 30.

33. Variants or mutants which result from a substitution, insertion or deletion of nucleotides or from an inversion of nucleotide segments of a dsDNA molecule according to claim 2, those variants and mutants encoding enzyme variants or enzyme mutants for the production of secondary substance(s) having properties characteristic of tubulysins.

34. A kit for the production of tubulysins, comprising:
(a) at least one vector according to claim 17 or
(b) suitable media and buffers for the multiplication of cells which allow expression of the polynucleotide and/or vector and
(c) suitable means for purification of the expression product(s).

The application's sequence listing, which the Patent Office published only in electronic form, follows.

SEQUENCE LISTING (47 sequences)

SEQ ID NO: 1 - DNA, 82868 bp, Angiococcus disciformis
  CDS (5719)..(7164): ORF14
  CDS (12841)..(13881): ORF11
  CDS (14942)..(15586): ORF9
  CDS (15847)..(16983): ORF8
  CDS (22366)..(23532): ORF6
  CDS (24591)..(26513): ORF5
  CDS (26597)..(27517): ORF4
  CDS (29858)..(30400): ORF3
  CDS (31220)..(32392): tubA
  CDS (35522)..(40147): tubB
  CDS (48011)..(58558): tubD
  CDS (62103)..(70616): tubF
  CDS (75488)..(76645): ORF20
  CDS (76787)..(77545): tubG
  CDS (77769)..(78695): ORF21
  CDS (79138)..(80019): ORF22
gcggccgccttcttcaccgcgggggcctcggcctcctcggtggtcggggcgggcgccagcttgtcgccgtgcaccttgccgggagcggtcgccttcttcttcgaggcggagcgcacgggctcgccctgcgtcacctcgcgcgtgggcagcatgtccccgtgggccttcaccgggccggactcaccctcctccgcctcggcgccctcggccggcgtctcgcgggtgtcgccaccctccttggcccggttgaactcgcgcatcgcgtcgtccaccagccccatggtcatgtacgccacgccgaggtcatggtggtcggatggcgacaggccctccttcgtgccctcgcgcagcttcgcgagcgcgtcctgcacctgcgtgtccccggcctcggacgcggtgccggtctcgcccagttcacccttcagctcctggcccaggtccacgccgcccttctcttcctgattcggggcgaccttcacctgggccggggcggagggggaggcaccctcttccgcggtgggggtgctgctctcgggagtggtgctctcggacggcggcgtctctggcatggcgggctccggggcaatccgctgcaggtggtcctgaagcttggccttgcgctccttcagctcctcgacgcgggcgcggtccttctccaccacgtccgggggcgccttggccacgaagttggggttctccagcttgcgcagcacgccggccatctcctgctcggcgcgggcaatctccttcttcaaccgctcgcgctccgcgtccaggtcgacgaggcccgccagcgggacgtagatctccaggttggagcccacgaaggcggcggcctgcggcggcttggcgcccggcgctcccaccgtcacctcggacaggccggccagcggcatgaggtagccgcgccagcgctccagcagctcgcgcgtgcgcacgtccgcgctctgcaccaccgccttcaccttggtggcgggcgacaggttgctctcgccgcggatggtgcgcaggccctcgatggcggcgatgaccggcgccatctcgccttccgccgcctcgtccacgtgcgccgcgtccggctccgggtacggggcaatcatgatgctgtccgtcggccgggccatcggcagcttctgccagatctcctcggtgatgaacggcatgaacgggtgcagcagccgcaggatgcggtccaggcagtacacgagcacccggcgcgtggagtccttcgccgccgcgtcctcgccgtacagcgagcccttcgccagctcgatgtaccagtcgcagaactccgcccagaggaactggtagagcgtggaggcggcctcgccgaagctgtacgactccagcagcgcgcgcgcctccgtggtggcgcgctggaggcgggagagaatccagcggtccgccagcgtcagtgtgctccggtccagcgggccggcctccatccggaagtcgcccatgttcatcagggcgaagcggctggcgttccacagcttgttgccgaaggccttgtagccctcgagccggtccatcgacagcttgatgtcgcggccctgctgggtgagcgaggcgagcgtgaagcgcagcgcgtccgcgccgaacggcggcatgccctgcgggaaccggttcttcagcgtcggctggagcttgtcggccggggcgccgaggacgatgtccagggggtcgatgacgttccccttcgtcttggacatcttctggcccttctcgtcgcgcaccatcgcgtgcaggtacacggtgcggaagggcacatcccccatgaagtggatgcccatcatcatcatccgggcgacccagaagaagatgatgtcgtggcccgtctccatgacggacgtcgggtagaaggtcttcagctccggcgtctcacgcggccagcccagcgtggagaacggccacaggccggacgagaaccaggtgtccagcacgtccgggtcctggatgaaggacgcgccgccgcacttcgggcaggacttcggctgctcgcgcgcgacgatgggctccgcgcgcgcgaagtccaccccgcccaccttcaccgtgggggcgtccagcggcaggtccgtgtcgtcgccctgccgcgggctgcacgaggtgcagtagtacgcgggaatctggtggccccaccacagctggcggctgacgcaccagtcgtggatgttgcgcatccagtggaagaacgtgttcgtccaggactcggggacgaacttcgtgcggccctgctccaccgcctcgatggccggcttcgccagcggttcaatcttgatgaaccactgcggagacaggcgtggctccaccaccgtggcgcagcgctggcaggtgcccacgttcagcatgtggggctcttccttctccagcagcccctgctccgtgaggtccgccagcacctgcttgcgcgcctcgaagcgatccatgccggcgtacttgccggtctccttcgtcatccgggccgcttcgtccaggatggtgagcatgggcagcttgtgccgcaggcccgtctggtagtcgttgaagtcgtgcgccggcgtcaccttcaccacgccggtgccgaacttcgggtccaccagctccgcgtccgcgatgatgggaatctcgcggtcggtcagcggcagcttcacgctcttgccggccagccccaggtagcgctcgtcctccgggtggatggccaccgcggtgtcgcccagcatcgtctccgggcgtgtggtggccacggtgagcgtgcggtcgctgtccttgacggggtagcggatgtgccagatggagcccttcttcgactcctcgtgctccacctccaagtcgctgagggcggtgcggcacgaggggcaccagttgatgagcttctgggcccggtacatcaggccctcttcgtacaggcgcacgaagacctcgcgcacggcggcggaggactgctcgtccatggtgaagcgctcgcggctccagtccagcgaggcgcccaggaagcggtgctgctcgccgatgcgggcgccgtacttgcccttccactcccagacgcgctccaggaaggcggcgcggccgaggtcgtgccggctcttgccctcggtcttcttcagctccttctccaccaccatctgcgtggcgatgccggcgtggtccgtgccggggagccacagggtgttgaagccgctcatccgcttccagcgcgcgaggatgtcctggatggtggcggtgagcgcgtggccgatgtggaggctgcccgtcacgttgggcggcggcagcacgatggagaaggcgggcttgtcggaggtcgcctcggcgcggaagtagttccgctccatccagcaggcgtaccagcgggcctcgacctcggtgggctcgtaggccttggacagttcagtggtgtcggtcattgcggacggccagccccgggggaaccggggccggcgggaaggtcttggagagaggttaaggcgaggaacgcgtcagtgctgcgtctcccggtccttgatgagccgctcgagctcctcacggatgatggtctccgccagctgcggtaccacctcccaggcaatcttctcgatgacctcgcgggaggccttcgagagcgcctcgcgcagcagcgcctcgccaccatccgcggcggtcggacgggccgtggccggagcggcggtcggcgccaccgcggtcggagcggccgtcggggggccgcccatgtccagggagatctcctcggcaccgctgggctcgggcagcgagtcctcgatgctgatggaaggctgggctgcctgcggcgccgccgtgggagcgcccaggccgaacgggtccctcgcgcgggccgccggctgggtcgcgccacccggcgcgggaggcagcggcgcggcgccgcccggaggacgcgggaagcccggctggctgccctggggaatccccggacgggccatgccggcgccggcccacccggaggcgcgggcacgcccggacgcggcggcatgcccggcgcggacgcacccggcggaggcggcacgcccgggacgcgcggcggcgcccggaggcggcatgcccgggcccggaggacgcggcgcgcccggagcacccggcggcggcattccaggccccggcgggcgggccatgcccggtcccggcggcattccaggccccggaggacgcggcgcgcccggagcacccggaggcggcattccaggcccgggaggacgggccatgcccggccccggcggcattccaggccccggaggacgcggcgcgcccggagcacccggcggcatgcccgggcccggaggacgcggcacgcccggctgggtgccctgcggaatgcccggacgggcggccgtgggcgcgcccggctgcgggcccggaggcaccggcgcgggagtggccggctgggcggtgggcgggcgcacctgcgtggccgcggaggccggcatggtgttggacttctgccccaccagcgccttcaccttgtcgagcagcacctggctctcgaagggcttggcgatgtggtcatcggcgcgggcggcgcgggcgcggttctcgtcgaaggcctcgaaggtccccgccagcagcaccacggggatgccctgggtggccgggtcgctcttcagggcctcgcagacctcgtagccgctcttgcccggcatcatcacatcggcgaggacgacgtccgggcgcagctcgcgggtacgggagatggcgtccagcccgttgtccaccgcggtcacctgaaagtcctcggtcgcgaagatcatcccaatcaccttgcggatggtgagcgagtcatcggcgaccagcagattcttgggcatcggttcgggcctcggggggcgtcccacccccctgaattcgttggagattcctgccgcgaaaaacccaggtcgcggccctgtatcaagcggggcagcttacgtttcgcgctccagcacgatcaagaaaacatgcgctgcaggtccaggaacagcacggagcctgtcaacccgggggcacggaaggctccaatggtggtctccggctcgaagtgctgcagcacgccgagcacccgggtggccgtcagccccacgttccggccggccagctccgtgaggatgaagagggcctcgggtaccgggggggagcccagcagcgcggggaccgagcagatgggccacagcacctgggcgtgcgggaagatgccggccaccggcccgctctgcacgggcaggacgctgaaggcctcccctcgcgatatcacctgggagacgaagcccagcgggacgccgaacaggcgcccctgcgattcgaagacgagcgccttgtcgggcgtggactcggcccagtggacggggcgcagggccgcgggcgcggcacgagggcccacccggtggggcagcgcctcggcgatgagctccaggtagagccgctccttgtgcagcaccgcgccccggctcaggggggccagcgagtccgccagcccggggggcaggaggaagaacggcgcccgcgccacgtcggcgacctccaccacggagcgcacccgcacggccagggtgggactcacgtcgagcaccaccaccatgcccggcccctcctcgggcaagccgccgagcagggccgacaggtccttcacctccagcacgccacgcaggctggagccgttggcgccgggcatggccacttccatgacggaggtggcctccaccgcgtagcgcgtctctcctgcctccacgagaaggcagagccggcgtccgctttcgaagggtgacacggccctaccctagcagccttcctcgccttggtggtaagccatcgagccagatggcgcgcatcctcctcgtcgacgacgaaaagatcgcccgcaccctctacggcgactacctcacggccgtggggcacgccgtcacggcggtgggctcgctccaggacgcgcgggaggcgctggccggggaccgcttcgacgcggtggtgacggacctcatcctccccggcggcgacggcatggaggtgctgcgccacgtgcgcgagcgccaccccggcgtggaggtggtggtcatcaccggcctggagaaggtggaccccgccgtgcgcgccatcaagagcggcgcggccgagtacctcgtcaagccggtggcccccgaggccctccagcatgccgtccgccgtgccctcaccacgcgagacctcctccaggagaacgcctcgctgcgccggcacgtcgccatgctggaggccggccagcgcatcgccaccacgctggagcgcgagaagctggcctccgccaccacgagcgcgctggagtccatggcctgcgccagcgccgtggtgctgctggagcgcgacggcgacaagggcctgcggctccagggcgtccgcggactgcctccgcggcacgagccggagctggtggccaccctcgtcgagcgcctctcgaacgcgcgcgcgccccgggagctggaagggctggacgccgccttcccgcgcgtcctctccatccccgccgtggagggcaccacggtgctgggccacgcggtgctcttcttcgacggcgccgagccggagtggaccggcgagacggcgggctacctggtgcgcaactgggcactggcgctgcgcaacctcgggcgcttcgcggcggtggaggacctggcgtacgtcgacgacctcacccgcctcttcaacacgcgctacctgcacctggtgctggaccgcgaggtccaggactccgtccagacgcagcgccccttcagcctgctgttcctggacctggaccacttcaagtccatcaacgacacgcacggccacctcgtgggctcgcggctgttggtggagacggcccgggtggtgaagggctgcgtgagagaccacgacgtggtggcccgctacggcggcgacgagtacgtggtgctcctgcgcaacaccgactccggcggcgcgctcaaggtggcggagcgcatccgccgcaccatggagacgcacctgttcctcgcgcgcgaggggctgtcgctgaagctcagcacgtgcatcggcgtggccagcttccccgagcacgcccgggacaaggccacgctgctggacctggcggaccgggccatgtaccggggcaagcgtggctcccggaatgtcgtctacatggcggccctggatctggagccgctgccggcggagcggcgccagggcggcagcggccccggcggctccagcacgtagcggctcagcggcgcaggttgcccacggtgaggcgcttggtcggggtggtctccacctcggcgcgtgctcccccgccctccttgcccaccgcctccacctcctcgtgcggggcaccggtggtgatgagccggtacttctccgaggcctcgcggtcatgctgggcctgctcggggtccaaccgggcaatcagctgccagaagagggcggcgtgctcgcgctcctcgtccatgacgtgacggaggatggccttggcctcctcgttgtcggtggcatcgatgtgggcggcgtagaggttgatggcgtccagctccgcctcgatgttcagccggatggagcgggccagctcggagtcggtcatcttccggggcaccagcgagtggaacgggttggtctgcggcatgaaggccctcccgaggccggtggtggcgtccacgttctggacggggcgccaggggacgcgaggagcatccgcgcggccaggggcccgggtcaacggaatccctccgcccgcgttgcgtagataccgctgcctccgccatgctcgggccatggaaacacccgcgccgctctcccagttgctccaggccctggaggcgggagatctgccggccgcgcgcgcggcggcggcggctctgcaacgtgcgggcgcgcactcggcacagctggcggcggaggtgctgcacgagctgcggcagcccctgctgggcgtgaaggcctacgcgcagctgctcgcggaggacggtggccccaccggcccgctgcggctgctgctggcgcaggtggagcggatggaacagatcgtctccgactacatccgcctcgccagcgagcggcacgcgccgcagcagcgcctgtcgctggcggcgcccatctgggcggcggcgaagctgttcagcgtcaacccggactcggcgcgcatgtctctggaggtggaggcgcccgaggacatcaccatccagggcaacgcgcggctcatcgagcagctcacgctgaacctgctgaacaacgcgcgcgacgccatggccggccgcgggcgcgtgaaggtggtgctctcgcgcgagggcgcctctccggtgctgtacgtggcggactggggcccgggcatccccgtggagctgcgcgagcgcatcttcgagccctacgtcaccgccaacaagcgcggcacgggactggggctggcggtgtgcaagcgcatcgcccaggagcacaacgcgacgattggcctcgcggcgccgggcgccattcgcgacgtgcccccgccggccaccgtgttccgggtactcttccccgccacggacgcgccgccgcagctgcgcaagcggctgctggtggtggacgacgagaccatcatccgcatggtcttccgcgacctgatgggcaaggagtgcgaggtcatcgaggcggccagcggcgaggaagcgctggatttgctgcgccaggcgccagtggacctcatcgtcacggacaagaacctgccgggcctgtccgggctggagctggcgcagcaggcgcggcggctctactccaactcgcgcgtcatcctgatgacgggctacccgtcgctggtgacgacgcagcaggcgctggagctgggcgtggtggactacctgctcaagcccttcgacgacatccggcaggtgcgcgggctgttgcgcacgacgctgtcctcggagccgccggtgcctccggtggtggcccccggggccgaagtgcggcgggtggacgtgctggaggacaacccgacgacggcgcggctcatctccgaggccctggacatgctggggctggaggcgcgggtgctgccctcgacggagctgatggcgatggcgacgccggtgggcgtggtggtgagctgggacttcgcgccggcctatgggcgcaaggcgctggagctggccaaggcgctggcccagggcgcccccttcgtcgtgctggccgagcacctcaccatggagacggcgctggagtcgctgcgcgccggtgccgccgcgtgccttccgaagctgctgtccgataccacggcgctcagccgtgagctgagccgcgccttcaagagagaggtcccatgagactcgcgctcctgtccgtcctgctcttcgcggtggcctgttcctcggacaagcccccgccgacggagcggccggacgggggcgcgacggaggactccgggacgggcggagaggacgcgggcccgacggaggacggaggcacggagccggatggtggctccggctccgatgcgggcacggatgcgggagcgggcgacgcgggcacggtggatggcggaagctgtgaggcgcccgcggccgagcccgatacggagctggccacgcgactgaacacgccccgccggctcgcggtggacacgacggacatctacatctccgagtcacactccctgaacccccagcagccgagtccgggaccgggacaggttctgaggctgccccgcgcgggaggtccacccacggttctggccacgggcttccgcgcaccagacgccatcgccgtggatgggacgagcgtctacgtgctcgacctggacgggctctggcgggtggacaaggcaaccgggaagcggggcgacctgcccatcgacgcgacggatcgcaacgtcaccgtcggtggtaccgaggtgctccgcgccacgctcgccggacgcgacgtgctggtggtcgctacggggcggcagtcgctggtccgggtggacaccgatggcggcaactcccaggttctctacaccggtcccggcggctccctggtgcgtggcgcgcgagtggtggactcggacgtgtggttcctcgtcagcgcggggacgggagccggaaacagctcgggtctgtaccgcgtcccgctggacggcagcgcgcccgcggagcggcgggacgccaccatcctccaaggcaattcactggaggtgacccccacgcacttcctcgtcaccgagggcggtgggggtaccggccgggtgttgcggctgccccgcgctggaggcaccgccgaggtgctggccgacggtctccagggcccgtggttcccggtggaactgaatgggaccatctacttcaaggagtcacgtgccgacggcgcggacttcctgcgccgcgtgcgcacgtgcgcgctggggacgtcggatccggtggggcccccgggcacgggaccaggcgggctcatcgtggacggcagcaccctcctctacacgtcgcaggagagcggcaccggcggcgccgtgggccgcgtgccctgacgccctcctccacccccgaaaagaccacggccccggcgcctcgcgaggaggcatccggggccgcgtcctgcatcagtggaacacctcaccggctcggcgggcccgaggcctcatcggccccggaccgccgtgagcggctcagtagtccatgtcgtcgccgccgtagtccggcatcccggcgccgccgccgttcttgcccttcttcttggcggggcggtcggcgatcatcgcctcggtggtcagcagcagcgaggccacggacgcggcgttctgcagcgcggtgcgctcgaccttcgtcgggtcgatgacgccggccttctccaggtcctcgtagacctcggtgcgggcgttgtagccgaacgcgccctggccctcgcggaccttgttgatgaccaccgcgccctcgacgccggcgttggaggcgatcttccgcagcggctcctggagcgcgcggcggatgatctccacgccgaagtcctgctcaccgcccagcttcagcttctccagcgcgggcaggcagcgcaggaaggccacgccgccgccagggacgatgccctcctcgacggccgcgcgagtcgcatgcagcgcgtcctccacgcgggccttcttctccttcatctcggtctcggtcgcggcgcccacgttgatgacggccacgccgcccaccagcttggccagccgctcctggagcttctcgcggtcgtagtcgctggtgacggtgtcgatctgcgagcggatgagcttgatgcggccctcgatctcgctcttggtgccggcgccgtcgacgatggtggtgttgtccttgtccaccgtgatgcgcttggagcggcccaggtcgttgagcgtcaggttctcgtacttgtggcccagctcctcgctgacgaccatgccgcccgtcagggtggcgatgtccttcagcatctccttgcggcggtcaccgaagcccggcgccttcaccgcggccacgttcagcacgccgcggatcttgttgaccaccagggtggccagcgcctcgccctcgatgtcgtcggcgatgatgagcagcggcttcccggagcgcgccacctgctccaggatgggaatcatgtcctgcatcgacgagaccttcttctcgctgatgaggatgaaggggtcgtccatgacgacctccatgcgctcgcggttcgtcacgaagtacggagagacgtagccgcggtcgaactgcatgccctccaccacgtcgaggttggtctccaggcccttggcctcctcgacggtgatgacgccctccttgcccaccttctccatcgcgtccgcgatgatggagccgatggtctcatcaccgttggcggagatggtgcccacctgggtgatggccttcttgtccgccgtgggcttggacagcttcttcagctcctccacgacgacctcgacggccttgtcgatgccgcgcttgaggtccatggggctgtggccggcggccaccagcttgaggccctcctcgtagatggcacgcgccagcaccgtggcggtcgtggtgccgtcgccggccttgtcggaggtcttcgacgcgacctccttcaccatctgcgcgcccatgttctcgaacttgttgtcgaggtcgatctccttggcgacggtgacgccgtccttggtgatcgtgggcgaaccaaagctcttctcgatgaccacgttgcggcccttggggcccagggtcaccgccacggcatccgcgagggtccggacaccgcgaaggatggcctcacgcgcggactggtggaagaaaatctccttcgctgccatcgcaacctcctgaaattactgggggatttaactgtgacgacgctggccgttagcactcggccatggcgagcgccaacataagggccagcgaaatgatgtcaaccaggaagggcgtgcctgtgggcgagcggacggggccagggcccctcggggccgtctggccggggggctactcggcgaagcgcacgaggttgagcagctgacccatgtccaggggtttgcgcagcgtcagcgccacgcccttgcgcaggccccggtcggtgacgccctcgtcctgggcgcccgtcatcagcagcacgggaatggcctggaagcgggggtcggccttgagcatctccgtgaagtggatgccgtccaggtggggcatgaggtaatcggtgatgaccatgcccacctggttgcgctccaggatgtcgagcgcctgcagggcatccgccgccgagtagaccgtgtagccatgcatctccaggaagcgagagagcatggtgcacagctcgagatcgtcatcgacgacaaggatgttcacggggcgggccgtcacacatggacgggcgccggaacctaacagccgtgcccgtcgttgacaacgcacagcgtgccttcatatgtgccggcccatggggaagcggaccgcgaagcgagagggggtgggtggcgtggaggctcggctggatgcggtggcggacgctttcgaggccggggacttcgaggccgcgctggccggggcggagggcctgctggcggacgcgcccgagcttcccgaggccctccacttccgggcttcggccctggtggaattggggcggctggaggaggccgggaaggccttcgggcaggccctgaaggtggcgccggaggacctggaaatcctgctgagcgccgcggactgcctggtgtgccgcgccggggaggaccgggaggcggtggcggaggggctcgccctgtgcgcgcgaggccggcgcctggcccagaaggccgacgacgtggagatgctgtacgagttcctcctcctggagggcatggggctcaaccagatgggcgagtgcgccacggcgctggtgagcctggacgcggcgctcggccacatgccgcgctcgctggacgcgcaggtcgagcggggcatcgcgctgttcgagctgtgccgcttcgacgaggcgaaggccgctttcgagaaggtgctgaaggacgcgccggacgacccgtgggcgcaccactacctggggctcatcgccgagcggcgcggggacgagaaggaggcgaagcggcgcttcgacaaggcgcgggcgctggtgcccgaggagttccccccgccggtggagctggccgaggcggagttcgaccgcgcggtggaggacgcggtgaagtccctgccccgccacgcgaagcagtacctggacaacgtcaccatcgccgtggaggacctgccctcggacgaggatttgctggggcaggacccgccgctgtccccgagcatcctcggggtgttccgcggcacgcccgtgggcgagcggagcgtgatgaacgcgtatgagctccccgcgtccatcgtgctctaccagcgcaacctggagcgcttcgcgaggacgcgcgaggaactcatcgagcagattggaatcaccgtgatgcacgaggtcggtcacctcatggggctggatgaggacgacctgtggcagcgggggctggactgacgagcgaggcccgcgtggcttccagcgtctggcggatgccctcgctgtagggcgtcttgcgcacgctgcccagcagcttgtgcagcgccgagtcgtccatgaggacgggctcggtgagcaggtagtgcatctcgaccatctcgcgcatgaacgggttgaagaggccgatgaggcggagcatccccttccccgccgtcatgaacttcgcgaggtggccggcctgggcgtagatctcctcgacgagcttgcgctgtgaggtgacgccggcgccggcgaggttccaccagcggccgtaggcaccgggggcgtccatgagggccgtcacggtgggacccacgtcgggcacgtagacgtactcgtgcggcgggtcgatggggccgatgagctgggcgcgcttgccctgggcggcggcgacgaaggcggagtggaggaagctcttgtcgatgccggggccgtagaagtccgggaggcggaggatggtggcgcggagctttccggcggcgtccgcggcgaggaggatgtcctcctgctccttgcgcatgcggcccttgaaggtgtgcggctcgcgggggtggtcctcggtgacgggcgtggtgcgggggcggccgtacgggtacacggtgccgatgagcaccacgcgctcgacgccctcggcgatggcggcgtccacggtgcggcgcatgagctccgggtggagctggaagcgccagtagtccacgccgaccatgtagatgagcgtgcggatgccccgggcggcggcgcggatggtgtccggcgcgtcggggttccaggtggcgatctccgccttcgggtccgcgccgaactgcgactgaagcgaggcgcgcgagcggccaaccacccggtacgccctcccctgctcgcgaagagccttcacgatgctgtgtccgatggggcccgacgctccaaacaacgccaccttgtccgtatccatggtccgctccctgggttccgaacggcgagcgttttatgaacgtcgttcattgtgaacggtgttcatctactgctggccgttcaggacgtcaagccctacagtggggatatggggatttcggagcggaaggagcgccagcgggcggagctgcgcgagcagatcctccaggtggcgaaggacatggtgacgcgagagggctttggtgccctctcgatgcgcaagctggcggacgcggtggagtacgcgccggcgacgctctacctgcacttcgagaaccgggacgcgattgcccgggagctgtgcatccgggggttccaggacctgctggaggcgttcgagccggcggcatccgtggaggagccggtggagcggctgtaccggctgggcgaggcctacgtgaagttcgggctggagcagccggagacgtaccggctcatcttcatggaggacccgaagctgtcgacggcgctgttcagggacgcgccggaggacggcgcggggccgcggtccttcggggtgctggtgaaggtgttcgaggacctgaaggcggcggggaggattgccgaggacgccgagccctcgaagctggccgaggtgctgtgggccggggtgcacggcatcgtggcgctgcggctgacgtgtacgggcttcaagggctcgccgccggaggagctggcgcggctgttggtgtccacgatggtgaacggattgccggggttgaagcccgtgaaggcggcgcggaagacacggtgagccgggcgttggttgacggggcccgtggggtgcggcagtaatcgacggtggtagggcctccggacctggtggccggcccggtcttcaaaaccggtgaggggcgctgagaggcgtccctggtgagttcgattctcatgctctaccgccatgttttccttggggttttctgacgcggccctgatcgggttgcaggacgccccacccgcctgtacctctcgtacccaagttttacccaagtgaggggggtacgggagccgcgcatgacgaagtggagcgggaagtggatcggaggccgcacgtacacggccaccgacggaagcacgcgctggatcatccgcaagaccgtcgccggggtcgcgtacaacgtcacgctggacgtgcggagcgaggccgaggccctggctgagctggcggccttccgccgcaacccggccgcgtaccggaccgcgagccaggagcgccaagacgaggcccaacaggcccaggaggacgccgcgcaggcggtgttcctggacgaggatcgtgcccggcggttcctccagcatctgaagtccagcggcaggtccgacgagtacctgaagagcacgcgcagctacctggccgcgtgggcaacggcgctcgcggacaaggacctgcgcgcggtgaccggaccggcgttgaagaagatcctggccacctgggacaccggcaagaagtggaggatcatcgtcttcaagtccttcacctcgttccttcaggactcgggcgaactggacccgatggtgaaccccggacgcttcctgaaggtcccccctgcccgccggaaccacgaactcaagggctacagcatcgagcacgtccagcagctctacgcggccctcggctcgcaggccatccgcgatgtgctgtgccttcaggccaagaccgggatgcacggcaccgaggtggaccggctcgcgagcggtgacggcaagatcgcggtgctgaaggaccagggcgagatcgccgccaccgtcacgttcaagcacaagaccgggaagccgttcaccttgtcgctcgatgtgcaggggctcgccgccgcccagcgccttcaagcccggggttcagcgccggatcggcagaccatccgcgaggccgtggagcgcgtgtgcgcgcgcacgagcctggagttcgtccacttcggcgcgatccggcacagcttcgcaacgtggctggtcgagcagggcagcatctacaacccgaagggcggtggcctgtccctggaagccgtcgctcaggcgctcaaccacagcagtacgcggaccacggccctccactacgtcagcgccacagtgccgccgatgtacgtcgtccccatccgcctggagcattcgaatgatccatcggagttgcgcatagctcgggcacctgcggggtgaggctcatgaaccagagagttcggagatcagtacgaggaggttcgttgatgcgtcaggccccaggccggagccttcaacgttcttattgcgccgaacgctccaggtgattaccgcacgcctcccacaaaggagccattcgatgcagatcctggccgtaaccgaacctcctagtttcggggggaagtgcaccatcaccgacgtggcgggcaacgttgtcgggtacctccacctgcgcgtgtcctcgatgctcaacggcagtgcaggagtcgtaaccgatctccatggccgcgccctcatgcaggcgcccttcaactttggggtgtgggatctagaaacgcgacggagggtcgcgatcgcgttcgtcgaggcggccttcccggagactcgcgccgcaattgccggagccaagccgaccagagcccccatcacggttgcggagttcggaggcgtgctgcgctcgctgctcccttccacgcccactcaccccgtcgggactattcccgcgtccattccgatcgacgccatcaacatcgttgcggcggacctgtacccgaaccggacctgcgatagggagcacttggaagagttgacgaaggtgctcaacacggagttggaggcgcagtaccgcacgcgcctggagtggtcaggagacacgctgcacctgcgcgccaagtagaccatcggcccctcgggcgcggccagcaaagtctcttccttgatcgaggagtaggatgcggcgaactacgcctcgatcactgccggatcattcttgtcacgatgtcggggggttagagcgtgtcgatccggctgcggatgccaggacaagaagttctgcctcctctatcccgttgggccatgtcgaggggcaccaaaaccctcgctcgtgagcttcggccgcttcgttacggcgactttcaacgaggctcaaatcgtgagcttgcggatggcaacacctgggttcggatacgctccggctgcggttccctcctgcttcccacgccgctccttggtgcggactcgttcaggctgcttggtttgttgaggccgattgcctcccttccgaggggcgccctccgcgagcagtgcctcgatgctcgccaccgtgatcatcacggaccgtccgatcttcggtgcccgctccaaccggccttgctccaggagcttgaagacctgtgaccgcttgcagccgagcattgccgacgcgcgctccagcatcacagccgaggcgttctgtgtgaccgattgagcgcgaagcgcacgaacctcgcgcttgatctcggccagttcctggaggatggcgcattccacgggtgcgggctcgtggtcctcaatgggcacggcaggtcgaaagactggaatgggaataggaatgaggtccaacggtggctccggccgagcaagcaaggagcctgtacggatatagctgaagttctcgatcatggacttgtactcaaccggtctccgtcggaggccgtggatggtgtcgaaggtgtggatcgagccggtggccaccagtccgtccctattctgaatgtatcgaatctctccgaggtccttccgggcgctcgccctgcccgcctccgtgccggtgaaggcgaacgggaggcgcttggcccggcacctgagccccgttggacgccatggatggcccggaagggtcacagcaccggctacttcagccctttactcgtgctgcggcgtcatcgtcctgacttccccatagccttccatcccttccgatccttccacctctctctgcaaccagggggagaccgaagcagacagcatggaaggcatcgccgcagtcggaacgcatccgttccaatcacgggtgcgcaaggtccatccgagcgccagcggcgatgctctccatcaccccgtcgatctcggtctcccagcgtttcaccgtgacccggtacttgattccatcgctccgcttccagcccgtgttctcttcaccggccaactccttcatgcgttcaccgaacttcgtgagcgagaacgccatccggtcacggccctggtacttcaagtcctcgacgtagtggccgtacagcgccgtggccttgatccactggtcccgctgcgcgcaccggcgctcgaagaaatcttccaccgagtccttggctcgaatctcatcctggcgggcctggacctgcgccaattggccgaggagcgggctctccgccttctcgtccacgctcgtccacatggccaggaagtcgatctgctccagtgccgtccagttcatctggggcagacagtccagttgatagaagcgtcgcattcccgtgggatcgacgacgatctccttcacctgcttgttggacgcaccgatgaaggtggcgttgttggtgccggtctggagcttctggacaccgagcacccggtactcgatccgctcggcggtgatgcggttcttgagcacgtcagacgctacccgctctgccttcgccatttcgtcgaagaacatgccgtagcagcgagtcaaccggaactgctggcgctcatcggtcaggaactggagatcggcggggaacccaacgagatcgccaagaggctgtagcaggctcttgatggccgtagtcttcccgccccgctgtttgccgacgaagatcggcatcaggtggtccttgaccggcttcccgaacaacttccgcttcacctgccaaatgaagtgaagaacgaccacgagatctaccgggtcaaggcgtcccgtggttgctcgaatgaactcctcggcgtcacctcggcgtccgtcctcgcggaacttcaacttctcacgatactgctcgacgatcccccggcgttggtccgcctcccacaggcgcacggcgttaccgagatttcgcacgctgatgcatgtgcgctcgttcgtggactcgatctcgatctgggacaagaactcggacgcaggaaacatccggcccccaatctggaagccatcgctcgcgtacacgaatgtgacgccgttcttctccatccagtgttgaacccatgtgcgcggctcgaagcggttctcgaccctcggcaacgcctgcaccaatcggtcgatgacctcgggcttgcagaccttcttcctcttcaaggtcccgacccacttcttgaagatgccatgctcggtggagaaccaaaccgagcaccagacgagagcgcgcttgatctcgatctccttcaccccaccgtgcgcctcatgctgttccacgagccagtcacagagtgccgaaggaagcgccgggcgcgcagaggccaagtactgcacgatcaggaactgacgagcccatgcttccgtcttgtggtgatgagcggcaagcaacttcttcatctcgcgatgcacccaatcatccacaccggatttctcgtgctgtgggtcgtggtccacgtacggaatctgagggtcacatccgcgcgcagaaaggcccttcgcgatccgcacaacttcacgaacgacgttcatgttcgtgccgtccatgtccggcgcatcgccgcagacgaacaccgtgcggccctgtgcaaggtatgatgcggcctcggggtgcggtacccactcgtccgtcaggtcatcccagcttcgtcgccgggcctcaacatcatgggccatgctgatgccggggagccccagcgccggggtgccttcctgcgcgagcagcgccgccttcttctcgccctcaatgagcgccatggggacttcttcgtcttgaagcatcgggcagaggatcgcggtgtcgaagatctggggcgcgtacccgaaaggagcctcgtacttcttcaccttcgctggctccccttcgacctcatcctgggtgtacgggcgcaggatgtggtccgtgaaggtcgcggttgggagggtgagctgcgcctccttcggccggagcacgcgcgggcgatgcggcttgaccttggcgtagttgagccccgggtacacgagcaccagccctccagcgtcccccttccattcctcgggccagttcaacaacttccggttgttctcgtccgtgtccgttcgccaaccgagtttccgcaccgtcgagggcaggaggcaggacttcttcaggtcctcgcagtctcgcgccgagatcggaagctcgttccactcagcctcgttgcggctggattcaacctcgttcgccttcgagtcgggcagtgccttgtccgagtcctcatgtcccattgggtacacctctcccatcaacgccgaagccgtgcttcgacgccttgaaatgcagggtggctcttgaacttgtatcgattctggctacgtcgttgcggcgccctggagcggagccgggttcggtgtggctacaaggaatatatcgaatgtgtctgcgcacctcggacggtgcgccccgagggccacgggcatcaacgccgctgcgcgatcctgcgccgtggacggccaggggattcgcgacgtacaccggacggcaaccttccgtgtatgagccgaggcacccgctggagcacggagtacctggacgcgatgctcgcggcctgggagaggtccgggctgacctcggagcagttcacggccacggccgcgccagggctgcctgcgcgtaccctacggctgcaccgccagcgaaaagagaaggagatccacgcagagcttcagcggcttcgggatgaaaacgcgacgctccggtcgatgctcgaaaggagcgcgttggtccctggtggttgccgggcggcaaccgtcagcgaccccaacggccacggcattggagatcgccatgtggcaaacggaaccgaagccccttcgccgaccgcgaccggcccgccagcattggagccggtacagccgcgcgtggtgccgcaggaccaggttgccggaccctcccccggtgatcacgatggtcgtgtgctcgtaggggaaatcaccgagccggtgcccccgaagagaccggcgttctcctgggattgatggcctcgcgcctgctggccgatgtcggacgccatctaccgctggtcttggtccgcgagcgccttcaagagcttcttgatctcggccgaggacatcgtgcggatgcggtccacgaggcgttgccgctcgtcatcctcgggaaacgtcaggagatccagcggcaacactcccaggtggtccgccagcaccttcaacgtgcgaaggccaagctcctgcggccagtgcttagaggtgggactcagggcacggagcagaggcagagcgcgagcaccaggcaggcgctccgccgcgctcaccctgccgagccctgtggtcgcttgtaataccctttgggtttatgaatagtagacctcggaccgcgagagccaccggccccgtccccctcagccgaggccccaccagggagccggaaggcccgagccagtgcccgccgcgcgtcccttcccacctggaggccgcacatgaccgatgacagcacgccgaccgacgaaacgcagatcgaggccccgacgccggagaacacctccgacctgaagggcgcccgcccccgactccggttcaccatcgagaccaccacgtacgagaccctccgcacgctggagcggcggggtaacggcgaggtggtgctcctggccgagcgtcacctcccccatggactcgccgggctcgtcaccatcaagcgcctgcgcaatcccgtcactttcgagcgctgccagcggctgatcgaggaggtccagctctccttccgcctccaccacccggccatcgcccaggtccatcacctgaaaatccatgccgaccggccgcacgtcatcgccgagtacgtggacggccccacgctggacaccatcatcagcctcgccaccatgcgcgagaagccgctctccgcgcccttcgccctctacatcgccgccgaggtggccgacgccctccaccacgcgcacacgctgagagattcggagaaccggccgctgggcatcatccaccgcgacgtggcgccccggaacatccgcgtggcccgcagcggcgaggtgaaggtgacggacttcggcgctacctactcgctcatggtgggcagggaggagacgccgggcctcctgctcaagggcgacgtggcgtacgcctcgcccgagtacctgaaccgtaagcccatggatggccggtccgacatcttctcgctgggcctcgtcctcatggagatgctgacgtgcaagcacctcttcgacgtggaggacgaaaaggcccccaacgccaccgtggacgtgaagacggaggagacgccctcggtgcccctcacgcagatgatcgcgctcgtcaaccgctaccgccccgaggacgtggagaacgcgatggcgggcctgccggacgcgctcaaggccatcgtccacaaggccctccagcgaaagctctccgagcgctacgccacggccgccgagatgcgcgatgcgctgcgagcggcgctcgcggcggagtcacagcccttcggccggaaggaggcgagcgaggagctggcgcggatgctgtcggaggcgtccgtcctgcgcgaccgggtggaactggacgaagaaggcatcttccccgagggcctggacgccgacgagccgacgcccgcaccgaacgaagagtgagaacgggcggcggtgcattccttgaagcaagcgggccccggtgtgggcccgcgtcgtttcagcgcaacaacacctgggccaccttcacgagggcatcgagctggtcctcgtccatcttgcgcgccagtccggtgagctggcgcagcttgggcgccccgccctgccctcgctcccccttgcccgacttcgtcccctcctccgcgtccgcgatccccagcaactcgtccgaggagatgcgcagcaccgagcacatccgcagcagcgtctggacgctgggcagcatcttcccgcgctccaggcggctgtagaccatgtgcgcgaggcccagcttctcggccacctccgcctgcgtgagcccgagctgcgtccgggcctcacgggcggcacttccaatacgggtcgccagctcttcattcatgcgtcggggtaccaggacaccgagaaccaggtttggcgcgggcaggaaggcccaagcctcggggacgccccttcctgccgcatctcggcggccatgtcgatccacgagcagggccccgtcacgcggcgcccctattggccggacccatcgggggcgggaacctccagggccaggccgcccaggatgaagtccacggggacacggaggacaccgcacaggcccaccagcgtggggaggctgggcagcaaccggccacgctccaggcggctgaacaccagcgtcggcacgtggatggcctcggccacctgggcctgcgacaggcccgcccgatgccgggcggcgcggacattggttccgatctgctgggagagcttcgcgtacatgaggagacctgggagaaagaggagaatgccgcgtgggcggcactccgagcatacagctcaccaggttcaacgatagtatccgctcaaggtttacccttctcccgcgccacttcgcggggggaactcgtacgagatccgctaccggttgagagcatgtccaggaacgccgaccccacacgccccgccgaaggagaggacacttgagcccgcgtctgcatcccgtcgtccccccgggcacggacatcggcgggtacctggtggaggagaagctgggagccgggggcttcggtgccgtgtaccgcgcccggcgtggagggcggctctacgcgctcaagctcatcccactctgggggctggctgagtgggccgagcgcgaagtggccatcctcctccggctcaagcactccaatctggtgcgcatccgtgggcatggacagtggccggatgaggcgcctcaatccttcttcatcgtcatggactacgtggaagggcgccggttggacgtatgggccagagaggagaacccctcggcccgagaagtcgtgctcaaggtgcgtggcgtggcgcgcgggctgggcgccgcgcaccgggcgaaggtggtgcatcgagacctgaaggagagcaacgtcatcgagcgcacctccgacggagaggcagtggtggtggacttcggcgcgggcgggtacgagagcgcccccagcatcaccggcggcgtgctgccaccgggcacgccggagtaccgcgcgcccgaggcctggcgcttccagcaggagcacggggacgagcgtggccactcctaccagcccggcccctcggatgacctgtactcgctgggcgtcgttctctattggctcctgacgggcaggcagcccttcctcccggacgaggccgcaggggtggaggccgtgctcaaccgcgcccccaaaccaccccatgtgctcaatccacgcgtccccgaggccctgagtgccgtgtgcatgcgcctgctggccaaggagcccgaggagcgccacccggacgccgacgcgctgtgcgcggagctggaggccctgctggcccaggcggacgagtcctgggacgtgaaactctgcgacgcctatggcccggacaccgccaccacgctcgcggcggtgccgcacgcgggcgaagacgagctggtgcaatggctgaagaagcgcaaggcccggcctcgtcgggggccacgtccgccacacggcgagggcgcacacgagccggactcaaacgcggtggccatccaggcagagctgccacccccagttcctgctcgccccggccccatgccctcgccgcccccggcacaagccggtcacttcaaggccctgcgtgtggcgacctggatgggtctgctggtggtcttgagcgcgggcgcgctggtgatcgcgcgcaccttggcgccttcccctgctcctgccgcacgtcacgccctggagcctcaccccagtgatgccgtggactcaccacctgcatcccccgagttcgacctcgcgccctgggcccccggccaggaagtggcggcgccatggatggcaccggaagctcaggaagccgcagccgcgctcgatagcgcgcccaccctagcggccgtcgccctccccgcgacgatctccgaggagaaggcttccgtgaagatgaagaagaacaccggcgtattctccgagcccgagccgcagcgcttccggggcggaaccgttggcaaggcgctcggcctcggtgtcgcgggctgcctagcgatggcctgccctggcccccaggtccgcccgacgcctccgccagaggcgtgcccgccaggtgctgtcgaggccatgagcaggcttcgaattgagtatgacgaggatgtggtagccaccttcttcgcgaccgccgaggagggggttagcaggaacatcacggtgcgcgcgggcccgacaacggttcacctggggagaccattgggaaatctaccggcccggaccacgctctccggacgcctcatcatcggagaggatcgcgtttacggccgactaactgaagcacgcacgccaaagggtgaccgcttccctgtatgcatgcagatcattgagaacgactctattgggttcaagaaggagatcaacgacggctccaacagcgcctcggtctatccctattttgacgtgaaggccgtccgccgcttcgagtgaaccccgaccaggagcaacatggggctgaaccaagtatcaatgcagggttccactctgctacttcaaggtctccgcgcatgcccatgtcacccatcgttgttctcctggtgatagcgcttttctccggggcagccgccgcgcaatcgcgtccagcagccacgggcttgggggtacgccggattgagttctcggccgagaacttcgaggcaatgacgacaccggaggtacagataagcccgggggtttccaccacgttcgagttcaactccgccctccttcaggagaaggtcgcggttgaaggcgccgaccgcttctcgctcgtggacattggacgaagcactctccggctggtgccgtcggagcaagtcctgcccggcgaacgcctgcgagtgacggtgcggttcctggacggagcagcgccggtaggcatggcattcatcctcgtcgcgcaccccgctcaggcggagcgcttggtcgaggtgtggcgcaaccagcgcacggtggagtcctatcaacaggaatcgaaagaagcccgagcggaggcccaaaggtgtcacgaagagaacgagcgcctgcgcgccgagtatgcgggaccgggcggcctcgctggcctccttgcgaaccgcgtgatcggcaagtcgggcgtttcggtcaagcccctcgacttcgagaaggaagtccgccagcgtcctggagacgcgatcaggattcttcgtgcatggagctaccgctccgccaaccgcgtgtccgtgctcatggatttggactacccagaagccgcgcaacgctggatcgcgcagggagcatcgttggtgagcaagacaggtgaaacgctgagcatgctccctgtatggcaggaagcgcccgttgccaatgcccggatccggcgcctcgtggtggaagcagaggctgagccggacgcggcccaggacacgttcaccctcaaactgtgggaatcgaacgggctgcgcacgatcaccctatccggggtgacattcccataatgttgagaacatcctcactatcaagctagcacccacatagcatgaagtccgcgcccgtgcgtgtcatgggccgttcaaacacctgaaaaccaataactacatccttacaccatccaaaccaagccccatgtctacagccgagcaaacgaagaaaataatcaagaagctgcgagccaccctaaacgaaggaagctcagaaaagattcaagcactcatccagtccatcagactggagaatccatctcagtggctgaatttgatcgccctcgcactgggccccatagatcctaggaatccaacattcttcgaaaaagtatccgcaataaacagattggcagaagatcttgcgccagaagagcagcacacgctacgcggatacgaaagcatcgcaagggccatgcagatcgtatcgcaagagtccgacaaatcagaattctggaaatcttcgcgcctcacaatgatgtggcgcctatttacgtacgttgaatcccaatacatatttgttagcaatacgattcgaaagaagctcaagcgggccccaccgggctcgccatttgtcatggcgagcccttcaatcgcggttccaggaaccgatgggaccgcaacgacaagtgtcgatcttgtttttgaatctaccgccgaagccgccgaactaatactccgcatctccatgcacaggatcgacacccaacccccaaatgaaaagtttaccccccagaccccttatgacgatcctgactttggcaggctcctcgcttgcgcacacgcgtggcatcgattcagcctgctatggaaccaaatccagtataccgactggcgacctgagcatgatccacgcggcttcatctggacaccaaaaaacaaggcgcaatacctccaaagcgaaatcggaaacattcgcgagcgcctatttttgcagcaagcaatgctgtctgatggactcggtcctggggcagaactggagagtagaagagaagtcctggaacgcctcaagaggagcttcaatctcccgaagccagggaaaacatgggaccttaagattgatattaaagccctgcgagatctcctcggtcttgatcgatatgccacggctcgcaagatctacatgtcgcgtcgattcctaaccccagtaatgggagcgccagcagatcctgaactggagaagtcacagaaggagttgaagttgaacttcacgctgcatgaactcgccatggctctgctgcaaaggaatcacgcaacattcaagaccaagtcagcaatacacaacattgtttttgcagtcaccaagcagcgcctatgcaaggtaatcagcgaggcgtcgggcatcgaattcgaattctgcttttcccatatcaacaacatcgtcttcgacgcacagagaaaaaacctagagatctgggaccagccgctcgtaccagtagatgaccatagggtgttgttcgttccttcgatcattgccaattcccatcctattcgcacaatagagcatttagcttcagctcgctcaagctccgcgtttgactcccggggagagtattatgagcagatgattcaatcgaggcttgaggaattaacacaagcagtcgctgtgcggggcatcaaatttcctgcttcagatgggcggcagatcgaatacgacttggtgctttattggcaagggcacctatttatcttcgagcttaagtgcctgaagatgacaacaactcctgtggatgagttcggggcgagggaggagatcgagcgcgccgagcaccaattggtacggcgtgtttctattgccgaaactgactggaaggagttcaggagccaagcacagggagtttcactccccgagactccgccagcgcgcagaaacatccatgccataatactgaccaacatcatgaactttacgggccgaagaactggagagatcgtgacggcagacgactcctgcctgtttagatacttcgacagccctcatgttcccgtatttgatgctgccacgggtgccgaaatctcaagcattgcacgtttgcgccttcgcaacgaggggccgccatctgcttcggggctttggcaatatttatcaagccctccgcagttggagtggatgcggaagcaaattcggcctgaataccacccactgccaccgctggatgagggcaactatcactggaagctcatggtcgcattcgatccggccgacgcccagacgactaaatagtgttggtttggtctcgttgcgaaggtgagcattgacctcggctggacgctggattcagcgtctacaacaacgatattgcagggtgaggcggaggctgcgtagccttcgtttagaacccgtggagaacccgacccatgacgctatacgaactgtttgaagccgatgatgaccgcgatgtccccgccgactttccttggctcttgatcgagatccctgaggagcaactccgccatgcggcgcttctcctgaatgagggtgagtggcgaccctcgcacatttctggcatctggtatcgggtggatcccgagcgcccagctcagaagcagcagcggcacgtccacgtcgccgcgaagaagcacatcaagatccccacgaagcaggcttcatggaacagagacaccacccgccatgaccgcaagacattcaatgcgaagctgggctcgcaagggagctatcaagacgtggcgaagacggcgctgggcctgccgcccgaggctgtcctcgaacacgttgtggaaaatccggccgaacaacagatgctgctcaccgaatccactgatccccagttgaaaactgagttctacaggtggttggaggcccagcccaggcggtctaacttcgaagcgctcgtcgaggacgcggttaggctcaatctgccgctcgacctggaatcgtaaggcagtggttaaatgcggtgatacgagcggtgatacgagcgcctaacaaaactggcatagggacccggcttctcaaggacgcagctgcaaccaaggcgattttgtaggcattctttggggcccgagacagcgcgcgggatctccggcacccagttcacggacgtcaccgtccccggtgcagccaatggcccctgacccctgccgtccccaccctcgtacccaagctgtacccaagatgaacggacgcgggtggacctccatggacgctccacccaccccgctccagagggaaaccggccgaccctcaatccctccgggcacctcgcggatcgggggagcggggcttcaaaaccggtgaggggcgctgagaggcgtccctggtgagttcgattctcatggggcgacgtgaacccggccgtgctccatgcgctccacaacgcggcggaagatgaggtcgataatggcgagggactgagccttcaggagtggccggaacagaccagggccacgtcagaagcgaacgacctccctttcgtaaccgaataacgaaacagaggcgaggatcacaactttcgaaatccgttgacgcccgtgggcttcatttcaggaatcctgggaaatgcctctccttgctcttcttgggcttctccatggtagcgcttcgcgcacccaggctctggtactatccatcatatggagcgctccctcggaacgacagagcaggtcttctataaggtacggcagaagcgccccttcaacatcgtcattacgggcaagctgcgaggacgcgtggaggagcaggctgtgcgccaggggttggtggccctgcaacggcgacacccgctgctccgagcgaagatcgtcgcgggtactccgccacgcttcacctcgcaaggtgtgccccccattgcgctggaagtggtggaacgcaaggcagaggagtcctggcaacagcatgtcgaggcagagcttgacaggcctttcaactcggaccctgggccgctcgtccgcttcatcctcgtgcggggcgagcaccgctccgagctgctgtgcagctatgatcatctgatcggagacgcgcactccggcatcttcgccctgcgcgatctgctgcaggtcatggcctcccaggaccagcacctgcccgagctcgccccaaggcccgcctatgaggagctgattgggccgatggtaccgggcacccgactgcttggcgccgccgtgcgccggggctcctcggcgctgctgcgcttgtctccgaccctcaatacgctcacagagcggctcgtcgcaccgcggggcatggctcgcagcagcgccgagggacaggcgctctacagccaccgaattctggagcccgagcagctcgcgcggctgcttgcgcgctgtcgagagcaagggtcctccgtccacgcagcgctcggggccgcgctgctgatagctcgggccgagtcgcagggtgccaagaagcgggtgacgctcaccctcacctctgcgttggatgctcgggagcgctttggcgtgggtgaggacttcggcctgttcaccacggggaagacggacttcttccgcgcgcgcggcagcaccccattctgggagctggcgcacagactccgatcgcctctgcaggcagcacggaagaagcggagccacttgaggctgttccgcctgatcctggagatatccgcgctcaccgtggacatctcctcccagccctggatggaacgcgcgacacggctgggcctgcactccatgctcgccctgagcaacgtggggcgtgtggagattgccgcccgctatgggaacctgacgctcgagggccttggcttcacggggacgaccgcggcccagttcgacgtggtgctgacggcgatcacctttgcccagcggttggaggccagctttctcttcaacaccgcgcacatgcagcgcgagcaggtggagcagctcgcctcgcgcacctgggagctgctggccgaggcgacgcgctgagcggctactccggctggatgttgtacatccgcttgacctcttccagcggcagctccatgaccttccagggatcccagtctccgaagaggtccacgctcatcgcgctgcctcgctccaccgcacgccgcagctggggaatgggaagcgcctcggcgagcaggcgaacgggcaccaaggacttgtactgggccggatcatagttgcgggtgcgggggccgaacatgaagcccaggctgaaggccgtggtcagcatttcctcccagatggagatgccatagccggagagcaggtggacgaagtcatgcacggccgagtgcacgggcagggcgtgagggtgacccggcagcggcacgccatgggagtggcagtacttccagaactcgcggccaaaggaaccctcgggcaggtgctcgagctgctgaaagcgttgcttgaggtctggcgcctcattgcgctcgcgcagcatgtcatagagcttccagggcagctcgcccttcggcagccccaacatgcggcagaagtactcaatataggcaggcacgaggaaggcggtcagtccaacggacagccacagcttggagcgcgcgtccgcggccagggaacgctcgcgcggtccaggggctcgctggtacttccgcagaaatacatccgtgagtattctcattcgaacaccttggctcgttatacggctggggcagctttcaggcaggtcgctgtctcctggagaaagccatacggatccttggggtcctcggccatggactccacctggagcaggcggcctacccccagccgctcggcgtgcgccaggatgacttccagcaccaccttgtcctccaaggaaaacccggtggagtcgaagacggtgaggccatcgcggtgagagcgccactgctcgggagagcgggtcagttcaaagaggctggggccaatctctccaggctcgagctgctggcactccccctccaccacggcctgggggagatagtccgggcataccagggcgcgacgcagcatctccaggggcagctctgtcttgccgggcagatctgagcccacggcgttgatatggaggtgggccttgatcagacgcccggacaccaccggccccgcgcccacggcgacggaggtggccgtgcagaggatgtctgcctcctgctccacgcgcgtcagggggaccgccaccacctccaggcccaggaaggccacacgccgggcaaagcttcgcatggcttcgggagcaatgtcgtgcaccagcacccgtcccagaggaaagacgcgcgagagcgcatgtgcctgggtgacggcctgagcgccacaccctaccaggcccaatacccggctgtcctcccgcgcgagcagccgactcgccacggcggaggccgccccggtgcgtagcgcggtaggaaaggtgccatcacaaacggcccgcaggtgcccggtcgtcacatcatacagactgagggaggaaagaatggtgggcaagcccagctcctccgggctgcgggggttgtagcccaccagcttgatcacggcgtggcgccccacctgcatgacgggcatccactccaacacgccggggtgggggtgctgatactggaagccctcgcgcttgcgcagctcggtgttggcggggtcgaagtgctccagctcgtactcgagggtggagatgacctcatccatcagcgcgtgcagccccgttgcacggacgatctggcgcagttcctgctcacccaggatccttgtcatccgcatggctgaccccgcccctttcagctgcatgacaggcctcactgcattcacggctccagttcagggccgggcaaaatctatcttcaacatccccttgtccaggaccgcgtccacggcatccagctgcgccaccgagcgcggcagcatgacgtggcggcggaagccgcccacgcggatgatgaggtcattgccctggcgatccaggacaatgtctccgcggtcggcacctggcatgaggagctgcagccgatagcggccctcgtgctgcttggcgaactgatagggctgcccggagatgtagcgctcggtggggtccgagtccccgtagagccgctgcgccagatcctccaaccgctccagccccaccacctcgtgctccagcagcgggagcctggccaccggcatgggggagaagtactcctggatgtgatccaggtaggcagattgagacttgtgccactgagcaaagtattccgtgtccggcagcagacgattgaccacgacctggtccaccgtcatgccatacatgttgaagtagaggtaggcccgctgtgtctcgcggatgaccattttttccgcgctggagaccaatcgcaccgtggtgcgattgccatccgtgagcaacccttcaatgcccttgacgcgatcgaagagctgctcgagggaggcaaagtagctgtcctccggcagatcatagctcgtgagccgactggccaggggccgggccagcttgacgagcgtgcgatccacattgaagcgccggcggatataccactgcagcacgctggtgatgttgacgaagcgcagcgactcgcccgtgggcggacagtccacgatgatcacgtcatagcgcccctgctgcacgtactggttcaggtagatgagcgagatgacgtcctccgtgcccgggagaatggcgacctcctcggccaccatgttggataccccggtggaggtcagcagcacggacatgtagttatagacttcactccactgccgctggagttcgtgctggatgtcgatctcttgcagttcaaggttgggggcgaccttctggggcagtccctcgttgaagtcgaagagcttgcgatcgagatcgaagctgtccgagaggctgtgggcaatgtcgaaggacatcaccaaggtgcggtagccgcgcttggcagcggccaccgcggtggccgcggatgccgtcgtcttgcctaccccacccttgccagagaaaagaagaattcttgtcatggatgccccgcgtgcctgccggcaacgggccgccatggcgctctccccctccatgggtcacctgttgcgtctgtggaactcatcactatcagcgacatgccagaaggagcaagctggacggtggcttgacttggtatgacgctggacagtaggtatgccaatagaggtggggggctttatgaaatcgatggattggctatcgggcacagcccccccccttgttcaattccaggaggggtgcaattgacagccacagcgactgccgagcacgcgctgaaagccctccgggccaagggactcgccacgtcggacgaggcgctgcccgcggtgcggcacgccagcggcgaaaaggctcccctctcatcctcacagcggcgcatgtggttcctggagcagctcgagccaggcaacgcggcccagcatttgttgcaaagtcatcacatacaggggcctttgcaggtagaggggttgcggcgggcgttggggctcatggtcaagcgccatgaggcgctccggctggtggttgccattggcgcggcgggccctgagcagcgtgtgcggcccgagtggtggcccgagctgcctctcagcgatctgagcggggtcgcccaggcggacagggctcgggccctggcggagctggcgcgcgtggaggctgcggcgcccttcaacctgcagcaaggcccactgttccgagtccggctggcgcgactggcggaaacggagcatgtgctgctggtcaccctgcatcacctgatctcggatggagcctggagctgcgaggtgctcatcaaagagctggcgatgctctacggccagcacgtggaaggctcgagcccggagctggcgccactgcccgtccaatacagggactacgctggctgggaggcaagcttcgcgcccgcgggagaggccttggaggcctggtggcggcagcggctcgccggggtgcccacggtgctggagctgcccacggagggagcgcgtcccctcagacagacgtaccgggcagggcgggtggccatcaccgtgcagccgcgcctgcgccaggcgctggaggacctggcgcacaaggagggcgtgtcactctttgccctgctgctcaccgccttcaccacgctgctacaccgctactctcgccaggaggaattggtggtggggtggcccgccccgcagcgcccccggcccgagctgcatggcctcattggatacttcggcaccccggtggcattgcgctcgcggctggagcctcacacccgggtgcgggaggcgctgcggcagctcgatcaggaggtgcgtgaggccaacgcccatgcggcgctccccttcgagcggctggtgagcctgctagacattgcccgcagccccagccgccacccgctgttccaggtgctgttcgacctgctgccggagcagccccagcctaccgctggcggctgcgccttccggccctgggagtccttcaccggcctggtggcgtatgatctcactctgctgctggagccgcgcggtgaggggctggagggggcgctggactacagcgcggacctgttcagcgaggcgcgcatgcagcgcgccgccactcagtacctgcacctgctggagcagctcgtggagcggcctcacgagaggctctcgcggctggcgctcctcacgcctggtgagcacgaggctttgctggcggggcacggcctgggcgggcccgtggagggcgcgcaggtgctggcccaccaccgcttcgagcaccaggtgcggctcaccccccatcaccccgcgttgtgcttcggcccgcaggtgctctcctacgagcagctcaaccgccgcgccaacccgctcgcccaccggctgcggcgcctgggcgcgggcccggacaccctggtagggctgtgcgtggagcgctccctggagctgccggtggcactgctggccatatggaaggccggggccggcttccttccgctggacgtcaatcagccccgcgagcggctcgccttcctcctgggagatgcgagctgccgcatcctcctcacccaggagcacctgctccagcgcctgccccccacgaacgccgcgctcctgtgtctggagagggaggcggaggcactggagcgcgagccccaggaggatgcgccacacgaggccgggctcgacaacctggcctacgtcatccacacctctggctccacgggcacgcccaagggcatcgcgatggtgcatcgctgtctggccaacctggtggcctggcagctcacccatgagcggctgggtggcccctcacgcacgctccagttcgcctcgctcaacttcgacatctgctaccaggaactcttcaccacctgggccgctgggggcaccgtggtcatggtgacggaagaggtgcgcagggatcctgcccggctgctggaagtgctggagcaggagcaggtgagccggctgtacctgcccttcatcgccctgcagcagctcgcgcgggtggcggatgagcgcggcgcggcccctcgccacctgcgccagctcattaccgccggggagcaactccaggcgacccccgagttgcagcggctgctctcgcggatgccggagtgcaccctccacaaccagtacggcccctccgagtgccacgtggtgacgagccatgacctgacacgcgagccgagccgttggccacggctgccgcccgtaggccggccactggcccacctccgggtgctgttgctggacggggagcagcagctcgtgcctccgggtgtggccggagaggtgttcctgggcggccccgccctggcgcgcggctacctgggacgtccggagcagacggctgatcgcttcgtgcccgatccattctcccgcgagcctggagcccggctctaccgcaccggggacctggcgcgcctccgagaggacggagcgctggagttcctgcaacggatggacgcgcaggtgaagatccggggctaccgcatcgagcctggggagatcgaggtggtgctgtgcgagcaccccgccgtgcaccaagcgcacgtgcggccctacgtggacagcgccggagagcggcgcctggtggcctacgtggccgcacggctcgaggacacggacggggcggagacagagcacgtggagcgctggcgcgcggtgtgggatgagacctatggcggcccaagcggcacggcctttgacctggccgggtggaatgacagcgtgcgcggcgagccgctgcctccggagcagatgcgagagtgggtggagacgacagtggagcggctcatggagctcgttccccggcgggtgctggagctgggctgtggctccgggctcctgctccgccggctcgccccccgctgcgagtcctactggggcacggagctctccccggtagccgtcgagcggctgagggagcaactccagacgggcggctccccgctcgcgcagcgcgtgcggctcatggcccagccggcggatgacttctccgggcttccggaagccggcttcgacaccgtcatcctcaactcggtgacgcagctcttccccagcgtggactacctgctgcgggtcgtggagggcgcgctgcgcgtgctccaaccgggcggaaccctgttcattggcgacgtgcagaatctgcggctcttcgagctgttccatgcctcggtggccctggagcaggcgtcagcggacctggaggcgccagcgctgctcgcccgcacccgccagcgcatgctgctggacgaacggttgtacgtggacccggacttcttcgccgcgctcgccacgcactttccccagctgggcgcggtccggctgcacctcaagcgcgggagcgggaggaacgagatgaaccgcttccgctacgacgtggagctgcagctcgcccccgtagcgaaagcaggccccgcgcaagagctgccagagctggactggaggcatgaggggctcggcctggaaaggctggagcgcatgctggcggagcgaccggcggggctggtgctgcgcaatgtggccaacgcccgcacggcggacgaggcggcacggctggcgctgctgcggactggcaacagcgtgggccggctgcgggcactgccggcggtgacatcctggaatccagagcagctctggaggctggcggaggcagccgactacacgtgccacgtcacctggagcgcccaggacgaggaaggccgtttcgacgcgctgctcatggcccgcgcggctggctcctcgcgcccggcggcctggctgacgcctcccccgcctccccctcgaccctggaagagctacgccaaccagcccctggcggccagccgccggcgcaccctcgtgggagtgctgcgaagccacctcgagcacaagctgcccgagtacatggtgccctcttccttcgtgctgctggacgcgctgccgctcaagcccaccggcaagttggaggtggcggcactgcctccccccgagcccgcacaagccgagcaaacgccaggccacctcgcgccgcggacccccaccgagcgccggcttgccgagctgtggcggcgcgtgctcggcgtgcatcgcgtgggggtggaggacaacttcttccagctggggggccactcgcttctggccacacggctcttgtcgctcatccgcggagagctggggctggagctgcccctgcgggtgctcttcgagcagcccaccctggcggccatggcgggttgtctcgaggctcagagctggagcacccaggctccccaccctccctctgcctccatcgaggagggagaactttgagcgccggagcgttgctcgcccacgccgcgagcctgggtgtacgcctgtgggtagagggcgagcgactgcgcttccaggctcccccaggggtgatgacgcccgagctgcagtcccgcctgggaggcgctcgccatgagctcatcgcactgctacggcagctccagccctcctctcagggaggcagcctcctggccccagtggctcgaaacgggcggctggcgctctccttcgcccagcagcggctgtggttccaggagcagctccaccctgaggccccggccaacaacctcacgggggccgtggtgttcaccggcccgctgcacgtggccgcgctgctcggggcggtggctgcgctggtgaggcgacacgaagcgctgcgcaccaccctgggcgaggagggcggagtcccctattcgctcatcggcgagccgtggcagccggcgctggaggtggaagcgctaccgggtgccaccgtgggcgagcggctggagcaggcccgagaggtggccctggccgagtcccggcgccgcttcgccctggagacggagccccacctgcgcgtgcgcctgctgcgcctggccgagcagcagcacgtgctggtgctcagcctccaccacatcgcggcggatggagtcgggctgcaggtgctcgaacaggagctggcggcgctctacggcgcgctgagcgctggggccgagccgcggctacctcccctgcccctgcaggtggcggaccttgccgactggcagcgccggtgggtggagggagaggagtaccaggtccagctcgcttactggcggcgacagctcgccgggctcacgcccctggaggtaccaggagatcatcctcgcccgcgtatcccctccatgagaggcgcggaggtacgggcgcccctgctctccgctccgcaagcccaggtgctgcgcgcgctggggcaaggcgagggcgccaccctctacatgacgctcctggccgccctgggcgtgctgctgcaacggtggacgggccagcacgatatggcggtgggcagcgccgccgccaaccgcaaccgcccgggcttggagggcatcctcggcttcctcctcaacatcgtcctgctgcggctcgacttgagaggccgcccccgcttccgcgagttgctgcgtcaggcacgcagggtgtgtgtggaggcctatgcccatcaggagttgcccttcgagcacctggtggaggcgctccagccaggcagcgagcgcggggacagctcgctctatcgcgtggcgctcgcggtgagcgacacgccatggatgcccggccacgggctgaagctggagggggtgcaagcgcagccgctcgactttccccggggggtgctggacctggatctccacctgtgggtgtatgacaccggggaggggctcaccgggcggttggagtacgccgtggatctgtatgaggagcccacggcaaggcggctcctggagggcttccgccaggtgctggaggcggtggtggaggcgccggatcggcccgtgccggagctgccggtgctgggagagcaggagcgccaccaggtgctctccgggtggaaccgcacacagcgcccctatccgcgagaggccagcgttcacggcctctttcagcagcgtgccctccaggccccgcgggccgtggcagtggtgtatggcgagcgcagcctcacctacggcgagttggcggagcgggcccgcgggctcgcacagggtctggtggcccgaggcgtgcggcgaggagacctggtcgcccttcggctggagcgctcgccggagcaggtggagtccatgctggccgtactccaagccggggccgcctacgtgccgctggatccttcctaccccgtacagcgccaggagttcatgctccaggacagcggcgcgcggttgctcgtgcacagcggcccgctgcccttcgctccccagggctgcgccacgctggatctccaggcatggcaccccgctccctccgacggtggcgagcccctgccccagtgcagcggagaagatctggcgtatgtcatctatacgtccggctccaccggccagcccaagggcgtggccgtgtgccaccgggccatgacccgcctggtgtgcaacacggactacgttcagctcgggccagaggatcgggtcgcccaggcttccaatgcctcctttgacgcggccaccttcgaggtctggggcgcgctgctcaatggggcacggctggtggggctcgccacggaggaggccattcaggcgcgccggctggccgaggtcctgcgcgagcagcggatctccgtgctcttcgtcaccaccgccctcttcaaccacgtggcccgggagcaaccccaggccttcagcaccctgcgctacctgctctttggcggcgaggcagtggatgcctccagtgtgaggcgggtgctgaaacagggcgctccaggacaccttctacacgtgtacggccccacggagaacaccaccttctccaccgcctggcgggtggaacacctggccgagcaggcgcataccgtgcccatgggtcatcccatcgccaactcgcggctgcacgtgctggacgaagcgctgcagccggtgccggtgggcgccatgggcgaggtatacctgggaggtgatgggctggcgctgggctactggcgccaccccgaggccaccgcggagcgcttcgtgccggatccgcacggcctggagcccggaggccggctctaccgcacgggagatctggcgcggcggcaggcggatggggccgtggtgttcgctggccgcgtggacaggcaggtcaagctgcgaggcttccgcgtggagccggcggagatcgagtcgcacctgtgcgagcactcggaggtgtccgcggcggtggtggagctgcggggcgaaggggccctgcggcggctggtcgcctatgtcgtcccccgcgccggtggccgcccaggtgccgaggagctgcgcaccttcctccgcacccgactgcccgagtacatgctgcccgccagcttctccctgctggaggcactgcccctcacccccaacggcaaggtggatcgctcggcgctacccgagagcttcgaggaggcctcccgcgagcaggctccggtggtacctccacgaggccccgtggaggcgctgctggtggacatctggagggaggtgctcggcacccaacgggtatccgtgcacgacgacttcttcgacctgggcggacactccctgctggccacgcgggttgtctcccgcttgcgagaggcgctgcaggtggagttgccgctgcgcaccctcttcgaggcccctcagctctcggcgctggcggcccaggtggaggtcctgctcggccaccggcagctccgcccccctccgctcgtgcccgctgtacgtccaccagagctgcccctctccttcgcccagcagcggctgtggttcctccagcagctcgcgccacaaagcaccgcctaccagatcctggatgcgtggcatgtgcggggccgggtggacgtgggcgccctggagcgcgccctggagcagctcgtgcgccggcatgaggcgctgcgcaccactttcgagcctggcggcgacggcgtgcctcggcagcgcatccacgcgccggctccggtcccgctgcggcaggtggacctgcgctcccatggcatcgccgcgcgggaggaggccttgcggtggatgcgcgagcaggcgctccggccactggagctggacaaggggccgctgctgcgcgtgtccctgctgcgcttggaagaggcacagtccctgctcttcctcgagctgcaccatatcgtgggcgatggctggtcgctgagcgtttggagccgagagctgtcgcacctgtacgaggcggcgctccatggcgctgagccggggttggcgccgctgcccgtgcagtacgcggacttcgcgctgtggcagcgcggctggttgcaagggccggtgctgcgggaggagctgacctggtggcgggagcggctcgcgcgcctggccccgctgcgcctgcccgcggaccatgcccgcccggaagtgcagcgcttcaacggcgcgacgtaccgcttcacgctcccgggcgtacgggtgcaggcgctgcggcggctcgggcatgagcacggggccacactcttcatggtgttgctcgccggcttcaatgcgctgctggcgcgctacaccgggcagacggacatcgccattggcgcgcccatcgccaaccgcacacgtggggaggtggagggcctcatcggcttcttcgtcaacaccctggtgctgcgcacccgcctggaaggcaacccctccttcctcgagctgttgaggcgggtgagggagacaacgctagaggcctacgcccaccaggagctgcctttcgagaggctcgtcgaggagttgcagcccgagcgccaggccaaccagaacccgctggtgcaggtgctgctcgccctgcagaacgcgccccgcgagccgttgcggctggcgggcctggaggccgagcacctggagtacctggtggccaccacgcgcttcgacctcgagctgcacctgtgggaggaggaagaggggctgagctgcatcgccgtgtatgaccgcgcgctgtacggcgcggggacggtggagcggctggtgggcgcctggtgcacgctgctggagggcgtggccgagctcccggcgcgccgcgtggcggagctgcccctggtgcctgcccgggagctgcgacaggttccgccgccctcccccgccgcggcgatcgaaacaagcatcggcgcccgcttctcggaggtggcgcggcggcagccaggcgccacggccgtcacccaaggcgggcggcacctcacctatgcagagctggaggagcgctcggaacgcctggcccgctacctggcctggctgggcgtgcgcgcgggcgacagagtggggttggccaccgagcgcacgctggagcggatcatcagcctgctaggcatcctcaaggcgggagccgcctacgtaccgctggatgtgcgccagccagcgcgtcggctgagcctgctggtgcaggccgcgggcgtgcgcaccgtcatcgccgaggagcaggctcgcacggtgctgtcaggcctggggcagccactgaccctggtcgatgccgcccaggagccggcctccgcgcagcaggtccccgcgctcgggccggagcgctcgctgggcggggacatgctcgcctacgtgcttttcacctcgggctccaccggcgagcccaagggcgtctgcattccccaccgtgccgtgctgcggctgatccatgagccctcctacgtccagctctcgccgcgggaggtcatgctgcactacgcaccgctggagttcgatgcctccaccttcgaggtctggggggcgctgctcaacggggcaaggctcgtgctggtccctccggaacagcagtcgctcgagagcctgggacaggagctgagcacccagggcgtcaccgtgctgtggctcaccgccgggctcttccggctcatggtggaggagcagctcaagagcctgcgcggcgtgcgccagctgctcgccggaggggacgtgctgcccatgccgcaggtacgccggctgcgcgaggccctccccgagtgccagctcatcaacggctacggccccaccgagagctgcaccttcacctgctgtcaccgcgtgggcagcccccaggagctgggcggctccgtgcccatcggcacccccatcgacctgggctgggtgagcgtggtggacgagcggctccagcccgtgccggacggagccccgggcgagctgctcgtgggcggccccgggctggcttgggggtacctgcaacacccggagctcaccgccgagcgcttcatccccgatccgctcagccggacgccgggggctcgcgtctatcggacgggagacctggtgcggcgcagggaggatgggacgctggagttcctgggccgcgtggaccaccagctcaaggtacgcggcttccgcatcgagccgggcgaggtggaggccgcggtgctcacccacccggcggtgcagtccgcggtggtggtggggcgcgagggccccggcggcaaggagctggtctgctacgccgtgccgcgggtggagagctcggagcagggctcgcagcaggagcagcggctggtacacgagtgggagtccgtgttcgacgggcacatgtaccgcgaagcccccgtgggcggagagccgaccttcaacatcgtcggctggaagagcagctacaccggccaacccgtggccgtggaggagatgagggactggctgcgccaccgggtggagcgcgtgcgcgggctcaggccacgacggatcctcgaagtgggctgtggtacggggctgatgctctttgccctgctgccgcactgcgagcgctacgtgggcacggatttctccccggcggcgttggactacgtgcgtcgctacctccccccggagcacccgggccgcgtggagctgctacaccgcacggcggacgagtggagcggcgtggcggccggctccttcgacgcggtgctgctcaattcggtggtgcagtacttcccctcgcaggagtacctgcggcaggtgctggcccgctgcgtggaggccgtggaggacgggggcttcgtcttcgtgggggatgtgcggagcttgccgctgctggagtccttccacgcctcggtggagctggagcgggccgccccctccatgccgctggaggcgtggcgcgagcgggtgcggcgtgcggtgctggaggacaacgagctggtggtggacccggcactcttcgtggcgctggcccatcagcatccacgggtgagccacgtggatatcgagctgacgcgcggcacgcacccgaatgagatggcacgcttccgctacaacgccgtgctccacatcgggccgcgcacgccgccaccggcctccgaggtgccgtgggtggactggtccacgcaaggactgagcctcgatgcactgcgggctcggctccggcagggcccgccagggccactgggggtggcaggcattcccaatgcgcgagtgctgcccgcggtccgggccgccgaggcgctgggcagcacaggcagcgcgcggcgggtggaggagctgcgccggcgcctgtcccaacccggcacaggggcccaggatccagaccccttctggcaactggccgagtcgctcggctacacggcggcagtgagctggtctcctgggcggagggacggggccttcgacgtgctcttcctcccggcgacgccagggatgcacccgcggtggctcggccccacgccgctcaaccgcacgccgcccccagcctccgcgcgtctgtcctcggagcctcggcgggccagcctctcactgaggctgggctccgcgctgcgggcccacctgcagacccatctaccagacttcatggtgccctcacgcttcgtggtgctgcagtccctgccgctcactcccaatggcaaggtggaccgcgcggccttgcccgtccccgactcgcgtcggctggaatctgccccgctggtgccccccagcaacgagctggagcgggtgctggcgcaggtgtggaaggaagtgctgggactggaggaagtgagccgggaggacaacttcttcgacgtgggagggcactcgctgctgctggcgcaggtgtgcagccggctggaggcccgactgggccggcggctcgaactggtgaccctcttccgctactcctccattgctgccctggccgagcacctgcaggccccccaggagctggcagccgccgaggcgcaggtgcagcgcatggccacggagcgcgccttgctccagcaacaggcagcccaacgccgccgggccggttcgaagcggggagctcccaatgacacctagtggggatgaagcgctgcagtcttccatcgccctggtaggcatggccggccgcttcccgggggccccggacgtggagtccttctggcgcaatctggtggccggagtggagtccatttccttcttctccgaggaagagctgagacaggcgggcgtgtccgagcagatacgtcggcgccccgagtacgtgcccgccaagggtgtgctggaagacctggagctgttcgacgcgggcttcttcggctactcgccgcgcgaggcgagccacctggatccgcagcaacgcctgctgctggagtgctcgtgggaggcgctggaggatgcgggccttcgcccggatcagctcccaggctgggtgggcgtctacgtgggcgccggggacaccagctaccgcttccagctgctgcgcggacacggggacccgctcagcggctccaaggatgtggcgggcttctttggcaactacccggactttctcgccacgcgcgtggcctacaagctcaatctgcgcggccccgcgctcggcatccacaccgcgtgctccacctcgctcgtctccatcaacatggcgtgcagcgcgctgcgcggcttcgagtgtgacatggcgctcgcgggcggcgtctcgctgcggctgcccgcgcgctccggctacctctacgaggaggggggagtcgcctcgaaggacgggcactgccgccccttcgacgcgcgtgctaccggcaccgtcacgggggatggcgtgggcgtggtggtgctcaagcgcctggaggacgcgctgaaggccagggatcccatccacgcggtgatccgcggctgggcgctcaacaacgacggcgcctcccgggctggcttcaccgcgcccagcgtggagggccaatccgaggtgatcgccctggcgcacgccgcggcgggcatcagcgcacgcgacatcacctacgtggaggctcacggcaccggcactcccctgggagacccgatcgaagtggcggcgctcacccgcgccttccgggcgcataccgctgacaccgccttctgtaccctcggtgcggtcaaatccaacatcggacacctggatgcggcggcaggagtggccggggtgatcaagacggtgcaggccctgcgccaccggctcatccctcccacgctccacttcgagcggcccaatcccgcgctccacctggagcagagccccttcttcgtcaacacccagccgctcccgtgggagagcccgcgcgggcctcggctggcgggggtgagctcctttggcattggcggcaccaacgcccacacgctcttcgaagaggctccgccgccgcccgccagcggccccacccgtcccaaccaggtgctgctgctctcggcccgaagcaccagcgcgctcgagcacatcgcaggacggctcgcggcacacctgcgccgccacccggacctggaactggcggacgtggcctttaccctccaggtggggcgagcccgcttcccctaccggcgcgccctcacctgtcgcaccctggccgaggccatggagcgcctggaggctcccgagccgcggccacccgagccgcttgctcacgagggagagcggccccctctcgtcatgctctttccagggcagggcactccgctggtcggcacggcccgtgcgctccatgaatccgagcccaccttccgccaggcggtggagcagtgtgcccggctcctgaggcagacgctggggctggatgtcagggaggtgctcttcccctccgcggagcaggaggagcaggcacgccggctggcggcgcagacgcgggtggcccagcccgcgctcttcaccctggagtatgccctggcgcagacctggctgggctgggggctccaaccgcaggcgctggcaggccatagcctgggcgagctggtggcggcgtgcctcgcgggtgtcttctccctggaagatgcacttcagctcgtggcagcccggggacagctcatgcagggatgcccaccgggggccatgctggccgtgccgctgccggaggccgagctggcggcgctgctgggcagcgagctgtgtatcgccgcggtgaacgggccacgggcctgcgtggcctcgggtcctctaccggcggtagaggcgctcaccgccgcgctggagagccggggcgtgtccagccggcgcctggagacttcccatgccttccactctgcctccatggaggcatgccaggggccactcaccacgctgctgcggcgcatgcgcctgcaggcccctcgcctcccctgtgtctccggcctcaccggccggtggctcaccggcgaggaggccacggagcctacgtactgggcccgccagctccgcgagccggtacgtttctccgaggccctcgagacgctctggagcctcaaggagccagtgctgctggaggtaggccccggcaccacgctcaccgcgcttgcgcggcggcaccccacccgccccgcccgcacccaggaggtggcgagccttcccgtgcaaccggacacggccgtgccgtgcattgaagaggccgtgggtgagctgtggcaggccggcctggagctggactggagcgccctgcacgccgcgccacgccaccgcgcacaccttccaccctaccccttcgagcgccagcgctactggattgaaccggaggctgccccgcagccgcgcgcgcagcagccgacgcccgcgtcccttgtgcccccggagcagccctcgcgcgaggccctggaagactggttctacgtgcccacctgggagcaggcacctgccacgagcggggggggacagcccctggcgggcccggtgctcgccttcatggactcctcgggcctggccgagcaggtgctggccgcgctgtggcccgcggactccggcgcgctcctcacccgcgtcgagccggccgggcactatgagcaactcagtgagcacgccttccgcctccgccccgagagcgaggaggactgggacgcgctcttccaggcgctccagtcccagggccggctcccccgtcgcatcctccatgcctgggctctcaccgcggagcccggcccctgtaccccggacggggaagcggtgctggaacagggcttcttcagcctgctgcggctggcccgtgcgctcggccgccacgcgcctgagcgccctgtacagctcgaggtgctgtccagcttcgtccacgcggtgggcccgcgggagccgctcgagccgctcaaggccacgctgctgggggcctgtgcggtacttcccctggagtaccctcacgtgcagtgccgcaccattgacgtgcggcccgggagcgagccacgggaagtgctggtgaggagcctggccgccgagctggccgctcccatgggagagagcccggtggcctggcgcgacgggcagcggtacgtgcgccgcgccacccggcagaggctcgaggcctcgcggcccctgcgcagccttcgggagcgaggcgtgtacctggtagcaggagggctgggtggaatcggcctggtgctggcgcgagcgctggcccagcgggcgcgtgctcggctggcgctactcacccactcgcccttccctccccgagagcagtgggagcagtggctggaggaagccccggcgcacccggagccggcgtggcggagcgaggccgacccctcggagcgccgcaggacccagcaccgcatccgctgcctgctggagctggagcagctcggcgccgaggtgcaggtgtacacggcggacgtggcggaggaggccgccgtgcgctcggtggtggagcaggtgcacgcccgctgggggaagatccacggcgtgctgcacgccgccgccacgttcgacgacggcgtcatccagctccgcacgcacgagcagtcctcgcgggccctgcgcaccaaggtgcggggcagcatggtgctgcacgaggtgctggcgagcgaggggttggattggttcgccctgtgctcctcgctggcgtcggcgctgggctcattcggccaggcggactactgcgcggccaatgccttccaggatgcgtatgcgcaccacctgcgccggcagggcttcacgggagcgctggcgctggactggggcacgtggagagatacgggggcggccatgcggctggtggcacgcacccgacgggggggccatgagaagccgcccacgccgctcacccacccactcttcgattgcgaacagcgcgagccgggcgggacgcactggctcggcctcacgctgaggggtggagaggactgggtggtggacgagcaccggctgcaaggggtgccaacactgcccggggtggcctacctggagctggcgcgggcggcgtgtgcccaggcgctgggggccgaggcggtggagctggcggagctgttgctgctggagcctctgacggtacctcgaggcgaatccaggcaggtccgggtggtgctccagcccgaggggcaggctcatgccctgcgggtggagagccggtcggaggaagcgcggggatggaatgagcatgcgcggggccgggtgcgcgccgtgcctcggctggccgagcgcatccagcccgagctgctgcgcgccgcctgcgaacacgagcagcccgtgcccggagagccccaggagcaaggccctgtccacgccggagcacgctggcatggcctcttccagtgggttcgccgcggccctcgccaggccctcgcccagctcgcgctaccggagcccttccacggtgacctcgagcgcttcgagctccacccggcgctcatggacatggccaccagcttcgccattcccggcggagtgccctggctcgcctttggctatgagcgcgtgctcattcacggtccgctgccaccgcaggtgctcagccacgtgagcctgcccgaggagtcgcaggctggcgcgcaacaactccggctacaggtgcggctgctggatctggagggctgggagcgggtgcggatcgatgggtacctgctgcggccgctgaagcccagcgacgccagtgtcgagccggcggcgcccaacgtggaagtcgccgtggggacgccggggctgctggagagccttggcctgcgccgctgcacccgccccgcccccgggccgcgccaggtggagatcgaggtggaggccgctgggctcaacttcctggacgtgctgggcgcgctggggatgatgccggcattggaggcggaggagagcgtactggggcgcgagtgctccggacgcattgccgccgtgggcgagggcgtcagcgggctgcgcgtgggggacgaggtgctggcggtggccccaggctgcttccgctcctacgtgctggtggatgagagccaggtggtgcgcaggcccgcctcgctggggctcgccgagggggcggcccagatggtgccgttcgccacggcgtacttcgccctgcacaccgtgggccggttgcggcgcggcgagcgcatcctcatccacgccgcggccggagggctgggtctggccgccgttcagctcgcatcccggaccggggcggagatattggccaccgcgggcagtgagcagaagcgcgagtacctgcgctcgctcggcattgctcacgtgctggactcgcgcagcacctccttcgtcagcgaagtgcgcgagcgcaccggcgggcgtggggtggatgtggtgctcaactcgctggcgggagagctgctcctggcgggcctgtccgtgctggccccgcacggccgcttcctggagctggggaagagggacctgtatgcggaccagcaggtgggcctccgaaccctggcccgagggcagactttcgccgccattgacttcggtccccaccacccggacttccgagcggtgctcgaggaggtggccacgcaactcacccagggccagctcgagccattgcccacccgcctcttccccgcgcggcaggtggccgaagccttcagcttcatggcccgcgcgctgcacatcggtcgcgtcgccgtctccatgcagggggcgacggcattgcccgcgtccatgactcggggctccaggcccgcaccggtggccgtacctccttgggaggacccgcggctggcgggcggcatctcctctgaagagggtgcggaggccttcctgcgcgcgttggagcaaggggcaccgcagctcatcatctccccccaggacttcagctcgctgctgcgcggcctgggcggcagccagggcgtgcgcgaaaaggagcgcctcgtcaccgggcgcgccgccgccgccgagccgcaggccttgccaccctcctcgctggagcagctcatcgagcaggtgtggcgcaagcacctgggtgtggagcgcgtgcagcccacggacagcttcttccagcttggaggagactcgctgctgggcatccaagtggcggcggatctccgcaggcacctgggtgtggagctgcccacggccaccctcttcagccaccccaccctcgccgcgctggccgcggctctgcgggctcgacagggtgaggccgcggctcccactgcccccgcgccagcgctcgtgccggatccagccgcgcgcttcgagcctttccccctcacggatgtgcaggaagcctactgggtgggtcgccgctcggccttcgagctcggcggcgtcgccgcccatggctacttcgaaatcgaaagcccggggctggaggtggagcgcttcatccaatgctggcgccagctcctgcagcgccacgacatgctgcgcatggtggtgctcccggatgggcggcagcaggtgctcgagcaggtgccggagtacacgccggaggtggtggagctgcgggggctctccccccaggaggccgagtcccgccggctccagctgcgtgagcgcatggcccaccaggtcctgcgcagcgaccgctggccgctcttcgagctggtgctctgccggtacgagggaggcgtccgcatccacatgagcatggatgccctgatgctggatgcgtggagttcagcggtgcttcggcaggacttcgcccagctgtaccacgagccgggccggccgctggagccgctggccatcaccttccgcgactacgtgctggcggagcgccggctgcgcgagggcgaggcccatgagcgcgcccgcgcatactggtgggctcggctggacacgctgccgccaccgcccgagctgcccctggtgaaggaaccctcgcagctggagcacgcgcggttcacccaccgcgaggctcggctcgagccacaccgctgggcccggctccaggagcgggcgcgcgcccacggcctcaccccctcggccgcctgcatggccgccttcgccgaggtgcttgcccgctggagccgtcacccgcgcttcaccctcaacctcaccctcttccagcgcttgcccctgcacccgcaggtggacgagctggtgggcgacttcacctccctggtcctgctggaggtagaggcacacgcggcgagcaccttcgccgagcgtgcctcccggctccaggcacagctatggcgggacctggagcacggcagcgtgagcgccgtgcagctcatccgcgagctcgtccgcaccggccgccgctccccgggcgccatcatgcccgtcgtcttcaccagcatcctcagcctggatgcgcggcgcggcccccagggcagcctctccttcttcgagggagaactggtgtacagcatcagccagactccccaggtgtggctggaccacggagtccacgaggaggagggggcgctcgtcctggcgtgggactcggtggaggcgctcttccctccgggcatggtggacgacatgttccacgcctaccagcggctgctgggggcactcgccgaggaggagcaagcgtgggagggcgagctgccggagctgctgcctcctgcccagcgtgagttgctcgcgcgctacaacgccacccaggcgccgcggcccagcggacggctggaggagggcttcttcacccaggcgcggctccaccccgagctccccgcgctgctcgcaccggagcgcaccctgagctacggcgagctggcaaggcgagcccaggcgctggccgcgcgcctacgcgagctggaggtgcagcctcaggagttggtggccattgccatgcacaagggctgggagcaggccaccgccgtgctcggcgtgctgcaggcggccgcggcctacctgccgttggatccagagcagccgccgctccggctccaccagctcctggaggaggggcccgcccgcgtggtgctcacccagtcctccttgctgcacaccgtgccctggccgccgggtgtgcaggtgatcgccgtggacgaactcgagcctgcaaccgaggcccccccgctaccgcctcgcggtacaccggagcacctcgcctacgtcatctatacctccggctccaccggcaaacccaagggtgtggccattgaacaccgggccgcgctcaacaccgtggtggacctcaacacccgctttggcgtcggcccggaggatcgggtgctgggcctgtccgcgctcaccttcgacctgtcggtgtacgacgtgctggggctgctcggcgcgggcggagcgctggtgctgcccgcggcggaggcggagaaggatcccgcccactggtgggagcggctggtggctgggcgggtcacggtgtggaactccaccccggcgctgatgctgctgctggtggagtacgccgagcagcgcgggctgaagctgcccgcggcgctgcgcctggtcatgctcagcggcgactggatccccgtggcgctaccggatcgcatccgcgcactcggcagggacgtgcaggtggtgagcctgggaggcgccaccgaggcttccatctggtccattgcctaccccattggccaggtggcaccgcagtggaagagcattccctatggcatgccgctggccaatcagcgattccacgtgctggacgggcggctggaggcacggccctggtgggtgccgggcgagctgtacattggcggcgaggggctggcacgcgagtactggagggatgagccgctcaccgcaacgcgcttcatccgtcacccgcgcacaggcgagcggctgtaccgcaccggggaccaagggcgcatgctgcccgaagggagcatcgagttcctcggccgggaggatctgcaggtcaaggtgcagggcttccgcgtggagctgggggagattgaagcggcgctggcccagcacccggcgctatcggcgagcgtggtggtggcacgaggagagcctcggggagtgcggcggctggtggcctacgcggttcctcgctcgggtcagacgcccgcggcaggcgagctgcgccgctacctggcggagcggctacccgcgtacatggtgccctccgccttcgtcctcctggagtccctgccccgcagccgcaacgggaagatcgcccgagatcagctccccgagccgcagcagacacagggactggctgcacaggccgcggcggccgacccgctcgtggagcggctggcagccctggtgaaagaggcgctgaggctcgagcgcgtggagccccaggacagcctgctggacctgggggcggactcggtggcgctcatccgcctcatcaaccgcctggaggcagagctgcagttccgcccgcgactggccgacatctacgagaaccccaccgtgcaggggctcgccacgctccaccaagagaagacaaagagccagggagagggaggcgctccgcggctcacggcgccccgctccacgcttctgcccgccgaggagtgggggcgcttcaaggccaaccgcccgggcctgcgccgcttccccgatggaacgcctgaggtggcactgccaggcagcggcttggcgccggcccccgaggagctgacagctctcgagcgccgccgcagtgtgcgcacctactccctcgagcccgtgagccatgagcagttgggacggctgctggcccccttgcgcgagtgggaggtgcagggctcgcggcgttacctctacgcctccgcgggcgggctctacccggtgcagctctacctccacctcaagcccggccgggcgcgagggctcgagcccggcacctggtattacgatcccagcacccatcggctggtgctcctgtccgccggagccgggctggatcgccgcatccatgatccgcaccagaaccaggccatcttcgactcggccgcgttctccctcttcctcatcgcccgcatgggggccgtggagccggtatacgccgaacatgccctgcacttcgccacgctggaggcagggctgatgacccagcttctcgatctgggcgcggctcccagtgggctggggctgtgccatatcggcgacctggacttcgcccaggcgcgggggctcttccacttggaggaggagcacgtgctgctgcacagcctggtgggcggagtactccccactcgggggcaggaggcggcctcggtgcccgctgagggaggaacggaggcgcggcaactggcgcagctcctgcaacaggtgaagacgctcacgcccgaggccgcgcgagcgctgctcgaggcccgccgcggcagcaaggggagaccacatgagtaagctgcacgaggagctggagagcctggcgccggagcagcgggagctactcgcggccctgatgaaagagcagggcctggacgagggcgcattgctgatgcccgtggagcgcaagcccgaggggctgccgctctcgtccgcccagcagcgcatgtggttcctgcaacagctcaggcctacgagccccttctacaacgtgcacgcggcgctccggctcacgggaaagctgaaggtggagtgcctggtgcacagcctgaatgagttcgtccggcgtcacgagccgctgcgcacggtgttcccctccgccggaggtcaacccctgcagcgcatcctcgcgcccgcaccggctgcgctcgagcagcgcgacctgagcggcgtgcccgcccaggagcgagaggccgaggtgtaccgcgcggtggagcacgcagcgctcgcctcctttgatctggagcgagagccgccgtgccgcttcctcctggtgcgagtggagccggaggaacacgtgctggtgttcgccacgcaccacatcgcagcggatggctggtcgctcggcgtcttcgtgcaggagctgtgcgcgctgtacacggctgctgtacacgcggagccaccggcgctgccaccgctgcggctgcagtacgcggacttcgccgcgtgggagcggagccggctcaagggtgggcgcgagcgcgagctgctcgagtactggcaggagcagctggcagggctgccggacctgagcaccctgccgccagagcggcccaggcccccgctgtccaagcaggagggcgccacgttcgaattcgccctgccaccacaccaggtgcaggccctgcgctcacttgctcaagcgcggcgcacctcgctcttctccgtgctgctcgccgccttccaatggctgctggcccggtgcgccggccaggacgacgtggccctgggcatgcccatcgccaaccgcaaccgcaaggagctggaaggcctcatcggctgcttcgccagtaccctggtgctgcgcgcgaagccctccgcctcgaccgccttcacctcatggctcgcccaggtgtccgagcagctccacggcgccctcgagcaccaggaggtgcctttcgaacgattggtggaggtgctccagccccggcgccgcatggatcggcacccgctcttccagatcttcctcgccatgcagcagcacccgctgcggcgcgccgagctgccaggcctgctgctctcggagttcccccttcgcagccgcgtggcccgcttcgatctggagttccacctctgggagtctgcccagggcgtcgagggcaccctcatctacgacgtggacctgtatggccaggagggcgtagcgcaactggtgcggcgctacgtgagcctgctcgaagccgtggcggcggacccgacgcggacactgggggagctggcgggtgagacgctggccccgcccgtacggaagcaggttctcgccctgtcggagtgtccgcccctcccacgcccgagcacagcccctcggacactggccgaggcacttctacagaccgccgagcgcttccccacggccacggtcagcttcgtccaggcacagggctcttgcacggcctggactctgccagagctggtggagcgggcccggcgcctgcaggccggcttgcggcagtggggattgcggccgggcgacagtctggtgctggtgctggggagggaggaagagacggtagaggcactctgggcctgcgtgctggcgggagtggcgcccctggtgctaccggcgccgcccgcgagagcggaggcgagtcccgcgctctcacgtctgcggcatgcccggcagctgctgggtgggccccgggtcctcacccggcaggagatgctgcccgatcttgccaggcagcttcaggtctcgcccaccgccgacatcctgggggccgtggaggagctgagagccacgggtggcgaggcgcccctgcccccagggcgcatggatgacgtggccctgctcaacctcacctcgggcaccaccggcaaggccaagtgcgccatgctcacgcaccgcaacctgctggtgcgcctggaggccaccaacgtcgtctacgagtcccagccgctcgagcgcggcctcgtctggttgcagctgcacaacattggcgccctgtccgagtaccacctccgcccgctctgcgccggcatgcacaccttccacgctcccaccgaggaggtgctcgccgagcccctgcgatggctggagtggctcgagcggtatggcattgcacagacgtgggcgcccagcttcgcctacagccacctgctggagcggctgcgcaaggtggaggaccggcgctggagcctgggaggcgtgcgcgtgctgctcagcgccggagagcagatctccgcgcccatggtggaggagctgatgcggaggttggctccctcgggagtgcgggaggatgccttcgtcgctgcctggggaatgaccgagacggcttcgggggtgacctatgcgcggcggcccggaacgccgccccgcatgcacaccctggagcgcgcgagcttgagcggtccgcttcggcacgcggcacccgcttcgcccaccgcgctgcggctgatggatgtaggagcccccattgccggcaccgccctgcgggtggtggacgcgagcggcgagctgctctccgaggagtgcgtggggcgcattcaagtgcgcggcgagatgatctctcccggctactacggggacccgaaggcctcggcggcgctgctcaccgccgacggctggctggagacaggcgatctgggcttcctctccgagggagcgctgaccattaccggccgcgccaaggatctggtcatcatccacggcaccaacttctcctgctacgagatcgagtccgcggtggagcaggtggagggagtggcgccctcctcggcggcggcggcggcggtgcggatgctcgaggggagcagggaggagctggcggtcttcttcgtgcccacggagggactcgctccgcaaccccctgcctcactcctgtcgcgcatccgccagcaggtgctcgagcaggtgggggtgcggatcgatcatctcatcccgctcgagcctcaccagctcccacgcacggagggaggcaagctgcgccgctcggagctgagggcgcgcttcgaagcaggtgagctgagggcgccgcaacccgctccggtcccgagcccctcgcgcccgctggagcagctcatcgcctccgtctgggcggaggtgctcgagcaccaggacatcgcgcccgaggccagcttcttcgacctgggcggcaactccatcctcctggtgcgcgtggagcgggcactgcgcgcgcggctcggcctggagctgacgctcatggacctgttcgcctaccccacggtgcactcgctggcggactacctggagcctcgagccgcccagctgccagcacaggcctcccctcccacgcaggccgagcgccggcgggggatgcgcggcgcggcgctggagcagagacgcactcgccgccaggcacaacgggacgaggactagacacgcatgagccacgacacgcagctcgagggagccgtagcggtagtggccatggcggggcgcttcccccaggcccccaccctggaggactactggcgcatcatccacgagggcgtggacgcctttacccagctcacggacgaacagctcctggcctccggagtggggccctcgctcctgcgccaacccggttacgtgcggcgcgccgccctgctggacaggatggaccagttcgacgccgcgttctttggcttctccccgcgagaggcggaggtgctcgacccacagcaccggctcttcctggagtgcgcgcacgaggcgctggagcgggccggccatggctccgagcgcgcaagggggcgcgtgggggtcttcgccagcgccagcctcaacagctactacctgcattccctgcacgggaacgcccggctgagggaggtgctgggagacttccagctcgccatcgccaacgacaaggacttcctgcccacccgcgtctcgtacaagctgggcctgcgcgggcccagcgtggcggtgcagacggcatgctccagctcgctggtggccgtccacctcgcgtgccagagcctgctcaatggtgagtgcgccctggcgctcgcgggcggctcctctctctccgtgccccaggcccagggctacctctaccaggagggaggcattgcctcaccggacgggtactgccgccccttcgacgcggcggcggcgggcaccaaccgaggcaacggcgtgggggtggtgctgctcaagctgctcgaggaggcgctggcggacggagacaccatccacgccgtcatccgcggctcggcggtgaacaacgacggggcacacaagatcggctacaccgcgccaagcgtggaggggcaggcctcggtcatctccgaggcgctggaggtggcggccgtctccgcggacagcatcggctacgtggaggcacacggcaccgccacggccctgggagatccgatcgaggtccaggccctcacgcgggccttccgcaagcacacggagcgccgcggctactgcgctctcggctcggtcaaggccaacatcggacacctggatgcggcagcgggcatcgccagcctgatcaaggccgtgctggtgctggagcgccgccagctcccgccatgcccgcacttcacctcccccaacccacgcatcgacttcgagcgcagccccttctacgtgagcgggcgggggcagccgtgggagccggtggacggcccgcggcgcgcgggcgtcagctccttcggtattggtggcaccaacgtgcatgtggtgctggaggaggcgccgccccggccggcgccgcggcgggcagcgcggccctaccagctcctgccgctgtcagcacgcacggagcgcgcccgggaggaggtcgaggcccggctgcgcgagcacctgcgccagcagccccaggagccgctggaggaggtggcccacacgctccaggtaggccgccgccacatggcctggcgcacagcgctggtgagcagcagccctgcccaggcggtagagctgctggagaggcgccgacccgaggcgctgctgcgtggccagagtgcggcccaggcccgctccgtggccttccttctaccgggccagggctcacagtacgtgggcatgggagcggcgctccatgagtccgaggcgcccttccgtgaacaggtggatctctgtgccgggaaactccagggcgtgctcgggttggacgtgcgccgcctgctgtaccctggcccgcgggagcgggaatgggcccaggagcgcctgcgggagacgcgggtatgccagccggtgctcttcaccgtggagtacgcgctggcccgactgctggaggcctgggggatacgccccaccgcgctgttgggccacagcctgggcgaatatgtggccgcgtgcctcgcgggcgtgttctccctggaagaggcgctggaggtggtggccgcacgtggacagctcatgggcagcatgcccccggggggcatgctcgccgtggggctcccagcccaggaagtggaaccgctcctacccgcggcactggccctggccgcgcacaacagcccccaggcctgtgtggtggcgggccccaccgagcccctggccgagctgcgcgcacgactcgagcagcggggcatcgcgtgcacgcctctggctgtctctcacgccttccactcgccgatgatggagccggcggtggccccattcgtcgcccggctgcgccggatgcatctgcggcctccgagcctgcccttcatctccaatgtgactggcacctggatagaggccgaggaggcgacctcaccggagtactggggccggcacctgctgcagccggtgcgctttgcccaggggctggagcggttgtgcgagggtgtgcagccgcggctgctgttggaagtggggccgggccacacactggggcggctggcggcgcgccaaagctccggccccgtgcaggtggtgtccacgctgggctccagccgggaggaaagctcggaggtggagcggctgctgacggcaatcgggcgactgtgggtggagggagccgaggtggactgggctgggctccaccgcggcgaacgccggaggcgcgcggtgctacccacctacccttttgagcaccagcgctactgggtggagacagccccccagccttcccctcccgagcggcctgggacacctgccgagagccctgtcaccagcagcttctacgtgccaggttggagccgcgcggctctgccctcggcggccccctcgagacgggtgggccggctgctgttgttggcggaggcccatgggtggagccaggggctcgcggagcggctccgggcccggggacactccgtcaccctcgtcgagccaggtgagcggctcgagcgcctgaccccggagcactggcgcctgcccccgggccgccgcgaggacttccaacgcctgctggaggactccggagagctgccctcgagggtgctccacctctggctgctggggagcagccagagcccccaggagcgcggcttctacaccctgctggcgctggcccaggcactgggagcccacggcacccggcccgcggtggagctcacggtggtgaccgatcagctctacgcggtggcagagggcgagccgatacagccgctcaaggcgctcctgcagggccctgcttccgtgcttccccaggaactccccgggtgcacgtgccgcctcgtggacatggccctgccgccaggcggcgtggcggaggagctgctggagcggctggtggcggaggtggagtccaccgcgtccgaacgctcggtggcgtaccgcggcgcggctcgctgggtgcgcgagttcgtccccgtgccgctgcccccgcccgagccttcgcagctcccgcttcggcagagaggggtgtatttgattgtcggcggcctggggggcgtagggctcgcgctggcagagcacctggcgcggcgcgtgtcggcgcggctggtgctcacgggccgctcgcccacgccaccgcgcgagagctggagcgcatggctgggcactcccacgcggctgcggctctcacaggagctcgagtggctgcgcggtgccgccgagcagatcgagcaccagcggcccctgcactccctggccgacagtcccggcctggaagagtcgctgcgcctgctgtgcgccagctacctctaccactttctcttccctcttcaggcgcctctgagacttggagagccgagggcgatgcaggcattgcgtgagcgcctggggctgcagcccggcttcgagcgcctcttctccttcatgatcggcaccctggagcaggcgaagctgattcgagtgggagagggcatgctcgagggtcaggtggagccagcccacgtgcccacacctcgagcactgcacgagcgactgctcgaaggctacccggaggtgtcaggcctgctggagctgcttgagcattgtgtgcgccactaccctgaggtgctccgagggagcctgccggccctcagtgtgctctacccctcgggccgctccgaggaggactccgcacgaagcggggtcgagtggagcagcatggggcagtgcgtggcgctgctgcggcatttcctcgcccgccatgccgagcgcacgcaggggcgtaccctgcgcatcctcgaggtgggcggcggcagtggcgtggtgctccaggccctgctgccgctgctgcggcaccacccggtggagtaccacttcacggatattggcccctccttcgtccgcgccatggagggagtcggccgccgccagggcctcaccttcctccacacctcggtgctggacatctcccgccctcccccagagcagggccatccgcctggctcgtatgatctggtgattgccctcaacgtggtgcacgccaccccgcgcgttcctcagtccctggcccacctcgagagcctgctcgtcccaggcggccacctgtgcctggtggagacggtgaagcagcagccctgggtggacatgatctggggtttggccgaggggtggtggagctacgaggacgagctgcgcacccgctctcccttgctggaggtaggcgactgggagcacgccctgcgcgacgtgggctttgccgaggtggaggtgctgccagcggccgtggagcagcgctcacgctgggacaacgtgctcctcattgcccagcggcccggcgagagcgggcttcagccagtgggcgggcgcgcggccatgcaggagcggatccgccggctgcgggccattgaagaagcgggaggcgaggtgctgcccctggtggcggacgtcaccgatcgggagcgcatgggcgaggtgctcgccgaggtgaagcgccgccatggggcgctccatggggtgatccacgccgcgctggtgctggaggatgggctgatgcagctcaagacgcgcgagtcggccgggcgcgtgctggcctccaaggtcgagggcaccctggtgctggacgaactgctgcgcgacgagccactcgacttcttcgtcctgtgctcctcgctgagcgcattgctcggcgcgctggggcaggcggactatgccgccgccagtgccttcctcgacgcgtatgcgcactcacagcgagggcgcacggaccgccgcaccatctccatggactgggatcgctggctggaggtgggcgccgccatgcgcctggggctggggctggcggcgggagcactggggctgcagcgcacggcacccggagagtacacggtgcgatggcaggccgagcgctgctggtggctggacgagcaccgcctggaaggacgggccacgctgccgggggtggcgtacctggagctggtgcgagccgccctggtccaggaactgggcgaggcccccgtggagctggagcaactggtgctgctctctctgctggaagcgcccgcgggggaggaggtggaggtgcgattccacctgcgaccggaggatgagggctatgcgctggagatccgcagccgggctggcggcctcgcgaatgggggctggcgcagccatgcgatgggccgggtgaggatgctgcctcgcgggagcgctcgacccacccacccgctacgggagctggaggaacggctcggcttgacccaggcgccgagggagcatgagccagctcagggcccccgcgagctggcacctgccctgggccggcgctggtcctcgctgagctggcaccgcgcgtggaagggagaagagggcctggccttgatcgagctccccgaggagctggccgaggatctgcggcaatggcccctgcaccctgccctgctggacgcggcgaccgggtttgcaccgctgccccccggtgcctggctgccgctgtcctatggcaacacccgcatccacggcccgctgccgcggcagctgtacagccacatccgccggctggagcccgccagtgcccaggccggagtggtgcggctggaggtgcgcctcatggacggcgaagggcgggagctgctgtgcgtggaggagttcgtgctccgccgggtggaggtggactcgttggctcggccacagcccgctggcaaggctccgcgccaggcagtgcttccacgaccaggcgcgctcgactcgctgcgactgcaacccctggagcgccttccgccgcaggagggagaggtggaggtgcaggtgctcgccgcgggcctcaatttcaaggacgcgctgctggcgctgggggcgttgccagtggagctggccaacggcgccccactggcgctgggagtcgagtgcgcgggcatcatctccgcggtaggtccaggagtgagaggcctgcgagtgggcgaggcggtggtggccgcggcagcaggagccttcgcctcgcatgtgcgagtcccccaggagcaggtcttccccaagccagcgggcctgagcttcgagcaggcggcgatggtgcccgtcactctgttcaccgcctggtatgccctggaggagctggcgcggctgcgcgcgggagagcacgtcctcatccacgccgcggccacgggggtgggactggcgggggtgaagttggcgctgcggcggggcgccacggtgtacgccaccgcgggcagcgagccgaagcgcgagctgctgcgctccctgggggtaacgctggccatggactcgcgcgcgcccgggtttgacgaccagcttctgcaacacacccaggggcgaggcgtggacgtggtgctcaactcgctgagcggcgagttcctctcccgcagcctgggcgtgctcgctcgccacgggcgcttcgtcgagctgggtgtaagggacatgctctctggcggcacgctgccgctggctcccttcgagcgcgggctcaccttcctcgcggcgcagatagacccggggatgaagggctaccgggagctgatgggcgaggccctgcggcagatcgagcgcggagagctggagccgctgccctacacggcatggccactggagcgcgtggccgaggcgctccagctcgtctccaagggcaggcacgtaggcaaggtggtgctcaccccggaagagcccttgtcacggccgccagcgctcccgagctcctcaaggccagtgcaaccccgggcaggcgtggcgattgtcgggctgcgctccgccgagggctgcgaggccttcgagcgcatcctcgcggccggcctgccgcaggtggccgtctccacccgtgagctgcgcgcgcgcatggcggagatcgagcgcctgcgcgtctcctcctgggagccggcgcttccctcggtgccccgcggctcccccgccaggaccgaacgctccaagccctatgttgctcctcgcaccgagcgcgagcgcgccctggccgcgctctggcaggacctgctcggcgtctccgaggtggggttggatgatgacttcttcgagctgaaaggggactcgctgctcgccatccagctcatggggcggttgcgcaaggagctggaggtggaattgccactctcctccttcctcgcccgccctacgctgcgcacactgctctccgccatgccagccccggcaacggacgagcctgcctcggccaccggggcaatcccagccgccgctccccagccgtcaccggctgtctccagcgaacccgctcggaagtggcgccacctggtgcccatccaacctcagggcgagagccctcccttcttctgggctgcgccgctgatgggcaccgtgtttccctacttcacgctggcccgctgcctggcgcccacccaccccttctatgctctccagccgccagggttgcaggaggggcaggagcccatggacaaggtggaggaactggcggccctgtacgtgcgcgagctgagagagctgcagccgcgagggccctaccgcctgggaggctggtccttcggctgcgtggtggcttatgaggttgccctacagctcgaggcggctggagagcaggtggcgctgctgagcctgctggacttccctgccccttcgggccagcgagccagtctctgggcgacggcccgcttcttcagcggctcggtgctgcgcggcctggcgccctatacgctcgactatctctacctggcggctcgcgctcctctgaatccagacgctgcctcgcgcctgagcagctccctgacccgaggatgggagcgcctgcggaaaggagggctggtgcaggaactgctggaccatgccgccatggcccgggtggtgcctgaggactcacggctgctgctgctgcgagagcctggcattgcccccatgttgaggctgacccgggctcaccagcgagccatgctctcctatcggccccgaggtcgcctccgccagcgcatcgtcctcttccgcacctccgagcaggcctggagcttcgcgcgagacctgggctggggagccctcagcgcctcgggcgtggatgtgcgcgaggcgccgggagaccatatgacgctgctgcggccacctcacgtggagcgggtggcagagcagctccgggccctgctcagctccgcgcctctcccgactcgccgctgagttcgggctgcgcgccagaggctgcctcatgcatgccctttggcagccagcccgagctgtccacccactccagcgcctcgctcagatcgtgcttttcgacgatctgatccaaggtgaccacctgcgcttccacgctgttgcccagatgagagggcacccgcggatcctctctccaataattgcctcgcggcagcagcctcttcgcctggaagtcgatggcctccactcccgccgctacggcgatgtccaccaaggcccagggcaacttcgagttcaacagccacttccaccagccccagttctcgttgtagcccttcaggtagtgcaccatgtcccccgccccctgggagaacacgaggaggtcccgcaggtccgccgccttggcgtagatcgcctgggccacggctgccatggtggggttgttggcgaacaagcctccatccacatagccctggtacaccggcgagacgatcggcagggagctggagcgcagggccaggtctaccaggcggtctcctgggttgacgaagtcggcacccggaaagttgtgaaagactcgcggcttccactcccgtctgttctcgtcagggttttcatcgtccaacttgaaggcggggatcaccaccttgcgcttcaggtccccgagcgtcttgtctcccaggatgtgggtgagcgcacgagccatgttcttgctgggcgtcagcgcgttcatgccaatgatggcccccaatctggtcctgagcgatgagtggaacagctcatgcgtgagccagagctgccgcgcctgctcgagccccacggcaggctcgcgagccgccgcgatgatgagcgcgctgatggctcccgccgaggtgcccgccaccaggtcgacctgatcaaggaagccgggccgcaactggtcgatgcgcttcaacaggccaatggacagcagcgtccgcagtcctcctccgtccaggctgaggatgcggtacttgccattccggcgagccccgtcggctcctggctgcccatggatgatggtcatttctccacctccggcggtccgaaggcgagatgccgcagctgcggccaccccatgtcaagcaggtggccgtcaggccgttcgaacccctgctcagctccgcgcctctcccgactcgccactgaactcacgctgcgcgccagaggctgtctcctgcgtggccttgggttgccagcccgagttctccacccactccagcaccttgctcagatcgtgcctcttgacgacccgatccaaggtggcgatctgggcctccacactgttgcccaggttgaagggcaccaccggatcctccctccagtagttgccccgcggaagcagcatctttgcctggaagtcgatggcctccactcccgcctcgatggtggcggccacgaaggccatgggctgcttcgggtccagcagccactttctccagccccagttctcgttataaccgtccaggtagtccaccgagtcgcctgtgcccagggagaacacgaggatgtcccgcacatccgccgccttggcgtagatggcctgggccacggctgacatggtggggttgttggcgaacaagcccccatccacatagccctgatggaccggcgagacgatcggcagggagctggagcgcagggccaggtccaccaggtagtcatccaggttgacgaaagtgtcacccgggaagttgtggaagattcgcggcctccacccgcgcctgtcctcatcagggtcgccatcgtccagctggaaggcggggatcaccaccttgcgcttcaggtcccggagcgtcttgtctcccaggatgtgggtgagcgcgcgagccatgttctcgctgggcatcagcgcgctctggccaaccagggcccccagctgattggagagtgggctatcgaacagcccaggcgtgaaccagatctgccgcgcctgctcgagccccacggcaggctcgcgagccgccgcgatgatgagcgcgctgatggctcccgccgaggtgcccgccaccaggtcgacctgatcaaggaagccgggccgcaactggtcgatgcgcttcaacaggccaatggacagcagcgtccgcagtcctcctccgtccaggctgaggatgcggtacttgtcattccggcgagccccgtcgcctcctgttttccgagtgcccgaagtcatttcgtcactccaggcagagggctctcggggggcacactgccctcacgaaggggaggtaccccacggaagcgcttcgagggcgaggcaggtactggcttgccggagggatgggggactccatgcttgtccaccggcaccgcgctctgtgcatgggactccgcgtcttccaaatcctgctccaccacctccagcatggcgcgcagcaactccctgcttgcccgagtggccccgagtcggagcgtctccatggccctcaggtacctgcccagccctgccacgggcatcttctgcgtcactgccgccgccgtactgggcgtctgtccttgtatttgtaccgcgtccctgtagtccacgtttcggccctccccaacgaaagtgtcatgcacagccgggattcctcactcactgtacatggcacctcaggtgtcttccacccgcttgcgctcgcatgttcatattcatcgtttgccctggagtgtgcgattgaccttgggctccgtgcgtagaaggccgtgaaaatccaagccgctcctccaaggcattgcgcgtcctaacgatgggaggggatcggggaagtgcagtagccagaaaagcaacgggctgccaggcagctatctaaatgggcgttgcgtgcgtgcgccccacctgcgctcacagacttgggagcagccaaccgtcaggtggagaaccatctagcgaagtagatgctcccacgggcaatccccctgccaaggcatgacggaccaccaatcccatggttgctgggccactccaagcgtggcggcgccggtgaaagaccttttcgcgcgcattgccaaacagttgcgcgaaatcccaactccctcctgaccggcgcgtcccttcgtgtgacagatccgggccaggatcggacgaatcatcgtgtgctggcttctcttcgagacgtgaagttccacgcgaccgggccgccccggaggtgccagccttactttactggtgtgattgtgatacagcctggtaatgaagtatttcagggaaatcgatttcgcgtgtgccacgtcaatgcgaatgggatcctctcaaatcgtcttccacccagaacacgaacccgaagcgttgcgccggcatgaagaagtccgagccatcccacgaggcgggatcgaacagcagccccttccacacagggaagacgcctcccggaaagatacgcggcacctcgacgctcatggattgttcgaggttgccgcaccggcccgtgacggccaggccgccgtagccgggaaccggctgcttctgcttgtcactgagtggagccgcatgcgtcgtccaaatcactttcggacgagcgcatcaggatccccatcaagatcaccggcaaaccgctcgactattcccacgcggccttcagcatccccgtcgtccacgcccgtgtactcctcggtgtccgggatgcgcatcgacacgacgaaggtggacggcgccaaggtgttccgaacctggggctggaccgtggccttgatcgtggccgaggagatcaaggaagccctggagcgcgcgggcgtcaccggcgcgaagttcacggacgtcaccggccccggtgcagccaatggctcctgactctgccctccccaccctcgtacccaggcccggtggttgttcgaggtggattcgcgcagcgtcgtcacggatgtgcctgcggacgagaagctgtccgccttgaatgccgcgacgaccgccttctcagatccgtctgctcgtagctcacccacgggcccaccacctcaagggagcgtacgttgccctcaacccggtacaacgactgatggcccctccagggcccgagccgcgcgggttcggcgcacggctgaggccccgcggcccaccctgccctatcgccgggcgctcttcgccttcggcgccttcttcttcgccgcgggcttcgcacgcttcgcggccgccggggccttgcgcgccggacgcttcgcggcgcgggccggcgggcccgcccacacctcgagcgcggcgcgcgtctcggccgcgcgcgtcttgttgcccagcgcctcctgcagcagcgcgagcccctccatggcgtggcgcacctgcgcgtccgtgagttcctcgtgctggaagaggttgcgatacgccttggcgagccgggcgagcgcgacgatgggctcggtcaccacgccgctgcccgtggcctgcggcgagcggaagtgcccgagccggtagctgatgctgccccagtcccagcgctcgctcgtgggacggccctgcgccagccggtcgcgctccagcgtcccctgccagtcggcgccgaactgggcgcgcagggctttctcgaggaagacctggagcgcgtcgcgcgcgctgcccagggccgggtcgagcatcgcactgacggtgacattgcgggtgctggcggtcgttcgacggatggacaccgggtactgctccttcgagagagagggaggccccaggaatgccctggcccgaagcgccgcgcaaaaaaacggtgtccccctacgcgggcttccgcaccacgcgctgacggcgggttccctcactctcaactgccggcgagctgttcccacgggaaccgggtcaactcgctgtccgtctcattccgataaacttcgcgttaacccgaaaaaggggctcgattctctatggggaggtcactggaagcccacgcatccccaggcgcacaggagtctcccccatgaagttcccccctgcttcgttgtgcttcgtgttgccgatgctctccgccacttccgtccaggcgcaagcgcccgagacctggacggagcactggttcgagcacaaccagaccgtctcccgcgtctaccaggacaatgacgtggccgtgtacttcgactcggccgtgaaccggtccatcacctggcccaacacctacctgggcgacgtgtggcgatacaccaagaggacctacggacacttcggcacggactcgcagctctacaccatcttccacgcaggaaagtacagtggaggccacccctccacgtacttcgacgccagccatgacaggcgcaacgtgattgatgtgggttccagttcccccacggcctggactgccggcaccggcaacgacctggacatcgtcacccatgaggtggcccacatcgtggaactcgccagcaagggcgtgcacgactcgcctgccttcggcctgtggcgcgacagcaagtgggcggagatcttcaactacgacgtctacctggcgttgggtcgcaccagtgatgccaatcgctggtacaacctgatggtcaacacgacggacagcttcccccgcgccaacacccactggttccgggattggttctatcccatctacaagaaccacggcggctcctcggtgctcaaccggtacttcgtcctgctcgcgcagtacctgccgaagaacggcagcaactacgcgcgaagcctgaactggggagagttcatccacttctggagtggtgccgcgggcgtcaatctcaagaccctggccacgtccgcattcggatggcccgccgagtgggaagcgcagttcacccaggctcagcgtgacttccccttcacctacacccccccgggccccacggctgtcaccgtgttccaggaccagaactacggtggctatggaatggcactgcccgttggccgttacaccctgtccgccctgcatgcctggggcgtgcgcaatgacgacatcacctccctgaaggtcgccagcggctacaaggtcaccctgtatgaacatgacaacttcagcggtgccagcctcaccaagacggcggacgatgcctcgctcgtcgacgacagctggaacgacaaaatgtcctcgctcatcgtgagcgcgtcggggatgtaggtcagcgccgctcgggctccggggcgtgccgggcttccttcgcgagccctccccggcgcgttcgcgccaggggaatggcgggccgcccatggattggagaatgggtcgcccccaacgggcccaccgcggtacacagtgcgcatgttcgacgccactcgctacctggagcgtatcggtgtctcggcgggtacgccgctcgccgcgctccatcgggcccacctcgaggccgtgccgttcgagaacctcgacatccacctgaagcggcccatccggctcgatgaggcggccttcttcgagaaggtcgtcctccagcggcgcggtgggttctgctacgagctcaatggcctcttcgcccgcctgctccggactctcggttaccgggtgacgctgctgtcggcgcgcgtggcctcgcgtcccgatggcagcgcctacggtcccgacttcgaccatctggcgctcctggtggaggacgcctcgggccgctggctggccgacgtgggcttcggcgagtgcttcctggagccgctgcgcctcgacgagcgcggcgtgcagacccaggacggacgcggccaccggctggtcgaggacgcggaggggctcgtcgtctggcgcgaggcggcgtcgggggactggaaggcccagtacgtcgtctcgctcatcccgcgcgagctcggggacttcgcggccatgtgccaccaccagcagacctcgccggagtcccacttcacgcagcgacgcctctgcacccggaccacgccggacgggcgcatcaccctcaaggagggcgcgctcgtcgtcacctcggggggcgcgcgccacgagcagcggctcccggacgaggccgcgtggcgggccgcgctcacgcggcacttcggcatcaccctgccctccggcggatgacgccgctccggacgcacatgaggagccggcccactctacctgccgccgtgaaggccccgggacgggtccgcaggccgccagcacttcactgagcgtagaaatccaaaggactcgccgtttgccctgctggcactggggccggtgatggatcaaattctaagaaacttcgagcccgcaccttcgacaatccagccagacaccttcggtttcaggagtgccccgaatgacgacgtccaaggtccggtccggcgccacgctgggtggagtcactgccaggttcagcaccggggagcagccggcccccaagaagtacgtggattacaccgtgaagagcggtgacacgttctcgggcatcgcggcgaagcacgagctctcgctggccgcattgaagaagctgaacccgcaggtcgagaacatcaacgtcatccacccgggccagaagctgcacgtgaaggtcgtgaatgcgcccgcgcctgagccgaagccgacaccgaagccgccgaccaacaaaaacaccagcgtgctccccaagggcatcccgaacaccgagggcatgtctcaggcgaaggagtacgcgctctactcgaagtacgtggagaagtacggcgacgccaaggcgaagcaggacctcgcggccggcaagcgcgtcatcgtcggcctgagggtgaacacgcccttcacccgtgatcgcccctccggcggctcctacgacgatcggctcgtcgtcatgtggaaggacagcagcggcaagccgcacgtccaggagttcaaggccaacaccgagcccaaccgccgctgggccgatgacccgagccagagcaccaagccggtcggccgcctcgtcggcaacaagacctaccactaccggaagagcttcaacggcaacttcggtggcaacatcctcgcgccggacctgcgctacgggaacccgaccgtgcggcgcgacaccaaccgcgatcaccggatcaactcgaaggacgatgtgttcagcggcgactggggcggccagggctactacttccatcgcggcggaacgaccgacacgtactccgccggctgccagacgatggaccagggccgcttcaacaacttctgggccgcgctcggctctcagagcgagttcagctacgtcctggcccaggtcggctgacgtggcgtaggggacccactccatccggaagacccggacacccgccgcgcgagcaggagtcgtaagacctcgccgtgccccgtcgtaacgggctccagccttcgtgagacttcccttggccacacgccaggaggtggtccatggagaaggagctggagcagttccgtcaggaagcgcagcgattgaaggccgggcggcgcggtggctcgttgccattccccgaggcgctgcgcgccttcgcggtgcgctacgccgagcacaccatggcgaagggtgggacggtgacggacgcggcgcagcaactgggcgtgtccgggccgacgctctacgagtggcgcaaggggcgccccgcgggacaccgccgtccgaagcccgccgagaagggcgcggctctggtgccggtgcacgtcagcgagcgtcctgccgcacctgtcaggtagtcatgacgcgcgtcgagcagctgcgagacttggagacggccaagcagggggcggcgctgctggaggcggaaaacgcccggctgcaccagcgccttgaggcgctcgtcgcggagaatgcccggctcaagggcgaggacgcccaggcgcacctgcaccacgcggatgagacgcattggctgctgctggacaaggggccgggcaccaagtggtacgcgtggacggtggcctcgcccgacaccgtcttccatcgcatctaccccagccgctccggggcgacggcgcgcaccgtgctgggcgactacgagggcgtcgtgctggtggatgggtatgcggcgtaccagacggcgacgaagtccagcgcggacgggccctgtccagccaccctggccttctgctgggcccacgtgaggagaaaattcttcgaagcccagcagtttgcccctgcctgcaaagaggtgctggacctcatcggcgagctgtacgccgtcgaggcggacctgccgggctggtacgcgctggagggcgaggagcgtcaggccgcgctcgcgcaccggctcgccgtgcgtcagcagaagtccgcgccgctgaccgagcgcatccgcgactgggcgcacgcgcagcgcgcactgcccggcagtgcctttcgcaaggccctcgagtacatgctcaacctctgggcggggctgacggtcttcctcacccagccgcaggtgccgctggacaataaccacgtcgagcgccagctgcgtgacatggtgataggcaggaagaacctcaagacagcgcggctgcgaggagaggccccgggccactacctgcggcgccctgcgctcgccgccatcgagaatccgggcaccgtgacgctgccgaaggcccagagctgaccaccgctcccgctgtgcggcccgggcgggtcagctcttagttcgggctcagcgcgaaggcggacacccggccatccgggatgagcgccacccggtagcgcagcatcgtggagccggcctgcaccaggtacgtgtagacgcggtcatcgccccgcatctcccgcttcgccaggacgagcggccccgacggtcccaggctctgtagcagcgactggtaatacggcgcggcctccgtgaagaaccacccggggacgtacgcgaactcggcagggttcagcgctccggcccgtgcctgctcgagcagcgtcgcgagccgggccgtgacctccggttcgaggtccggaatgggggccagcggaggcacggcgagcgcggggttgacgatggcggcgatgccattggcgatggccgcggggttcggctccgcgaggttgagcagcacgatgatggacagggcgtctccggtgaagcggtagtaggcggtcttgaagccctgccatgcaccggcgtgctggtgcacgagctggccgttgcgctcctcgatgaaccatccgaagccatacggataggaagctccgctggagagcttcacgggactcaggatgtcccgccagctcccgttcgtcaggatggcgcggtcatccacggcgtcatcccacgccagcatgtctttcagggagaagtagagcgagccatccgccgtggtgttgagggagggggagacccactcctggttcttcaccaccccgtcgagcaggcggtaaccggccgcgcgattgggaacaatgtcagcctcactgatgcctcgcgccgtcttcatgcgggtgggcttgaagacctgctcgcccaggacgttgacgtaggaggtgcccgcgacgcggttcaccaggaggcccagcaggacgtagccggcgttgctgtagttccatcgcaggccggcggggaagtccaggggcagcgtatagaggaactgcgcgaactcctcgtcggtgtagtccttgcgcaggtcgagcagcccatccgagaggccggaggtgtgcgtcagcaggtggcgaatcgtgatgggggcccaggtcgagggcgcgtcggggaagtacttcgtgatgctgtcggacagcgagatgcggcccgcctccacctggagcatcaccgccatggcggtgaactgcttgcccagggagccggactggaagagggtgtccggggtgacgggaacctgatgctccaggttcgagaaaccataccccttcgccacgatgaccctgccgtggctcacgacggccaccgcgacgcccggcacattcatccgtttctgctccgcgcgcacgaaggcatcgatgcgctcacggagcgattcatgggctgacgagggacggcccgcgagcagacccacgaggaacaccatcgccagggaaaaggactgcaacgaacctcgcatggggaactccagaggtcccgggcacggattgcccacggacccgcgtaggggaacaccgtccttcctccgtcgtaaaggcttcggggcggtgagaactacgatagttgtcgtatgaggggttctcttggactctcatccgcttccggtttagccgccgctcccgagcgaagcctcacgcttgcgtcgttcccgctctcggcgctgctggcgtgagcgggccgtcacctcggcaatgagggggtacggcgaggagttaccaggagtcagccctctttcccgggctcgagcggggcgagcggaagccgcccgagctcctgcgcgcgcgcgtgcaccgcgcgcaccgccgcgtccatcgcatcccggacgcccgcgctctcgaacaccttcaagccggccagcgtcgcgccaccagggctcgtgacctgcttgcgcaacgccgccggggactcctggctgcgatgcagcaactccaggcttccgcgcatgctctccaccgtcgccagggtggcctgatcacgcggcagccccagggccacgcccgcgtcgatgaacgcctcgatgaggaaatagacgaacgcgggcatggggccggcgaggcccgtcgccatctccacgccggcctcgtcggcgacctccacttcggtgccgagcgcgcccagcagtgagcggacgcgcaccagcgccggctcgctcaagcccgcgcttggaatccagaaggtggccgccttgcggacccgcgcgggggtgttgggcatcgcgcgaacgacgagtgggtgttcgagaccctcgcacagcgtctgcaggcgcgcgcccgcgatgatgctgacgacaatcgtgtcctcacggagctgcccgcgcagctgctggaggacaacacccaggtgttgcggcttcacggccagcacgaccagttccgcgtccgccgccgcgaggttgtccgcggtcacctcgacgccatactgctcgcggagcacccggcgacgctcctcgtcgacctctccgacgaggagcgtgccgggcgcggccaggcctcccccggtgaccgctccaatcaaggcctcggccatcaccccaccgccgatgaagcccagggctggcctccgcgagggcacggtggcatccatcgaatcggccgtcatcgcgaggtacgaacgggattggggcggatgagtcccttcacgatgcgacccgtctcgacatcggccagggcctgattcacctcttcgaggccgtaggtgcggctgaccatgtgctcccagcccttgccaccggcgaccctcgcaccgtgccggtcgaggatgcggagcatccggtggaagtggctgaagtccacgccccacacacctcgaatctcgaggtgctttcgattgatccctttagtgagggttaattgcggccgcgaattcgtaat

SEQ ID NO: 2 - protein, 481 aa, Angiococcus disciformis
VTRPYPSSLPRLGGKPSSQMARILLVDDEKIARTLYGDYLTAVGHAVTAVGSLQDAREALAGDRFDAVVTDLILPGGDGMEVLRHVRERHPGVEVVVITGLEKVDPAVRAIKSGAAEYLVKPVAPEALQHAVRRALTTRDLLQENASLRRHVAMLEAGQRIATTLEREKLASATTSALESMACASAVVLLERDGDKGLRLQGVRGLPPRHEPELVATLVERLSNARAPRELEGLDAAFPRVLSIPAVEGTTVLGHAVLFFDGAEPEWTGETAGYLVRNWALALRNLGRFAAVEDLAYVDDLTRLFNTRYLHLVLDREVQDSVQTQRPFSLLFLDLDHFKSINDTHGHLVGSRLLVETARVVKGCVRDHDVVARYGGDEYVVLLRNTDSGGALKVAERIRRTMETHLFLAREGLSLKLSTCIGVASFPEHARDKATLLDLADRAMYRGKRGSRNVVYMAALDLEPLPAERRQGGSGPGGSST

SEQ ID NO: 3 - protein, 346 aa, Angiococcus disciformis
VGGVEARLDAVADAFEAGDFEAALAGAEGLLADAPELPEALHFRASALVELGRLEEAGKAFGQALKVAPEDLEILLSAADCLVCRAGEDREAVAEGLALCARGRRLAQKADDVEMLYEFLLLEGMGLNQMGECATALVSLDAALGHMPRSLDAQVERGIALFELCRFDEAKAAFEKVLKDAPDDPWAHHYLGLIAERRGDEKEAKRRFDKARALVPEEFPPPVELAEAEFDRAVEDAVKSLPRHAKQYLDNVTIAVEDLPSDEDLLGQDPPLSPSILGVFRGTPVGERSVMNAYELPASIVLYQRNLERFARTREELIEQIGITVMHEVGHLMGLDEDDLWQRGLD

SEQ ID NO: 4 - protein, 214 aa, Angiococcus disciformis
MGISERKERQRAELREQILQVAKDMVTREGFGALSMRKLADAVEYAPATLYLHFENRDAIARELCIRGFQDLLEAFEPAASVEEPVERLYRLGEAYVKFGLEQPETYRLIFMEDPKLSTALFRDAPEDGAGPRSFGVLVKVFEDLKAAGRIAEDAEPSKLAEVLWAGVHGIVALRLTCTGFKGSPPEELARLLVSTMVNGLPGLKPVKAARKTR

SEQ ID NO: 5 - protein, 378 aa, Angiococcus disciformis
MTKWSGKWIGGRTYTATDGSTRWIIRKTVAGVAYNVTLDVRSEAEALAELAAFRRNPAAYRTASQERQDEAQQAQEDAAQAVFLDEDRARRFLQHLKSSGRSDEYLKSTRSYLAAWATALADKDLRAVTGPALKKILATWDTGKKWRIIVFKSFTSFLQDSGELDPMVNPGRFLKVPPARRNHELKGYSIEHVQQLYAALGSQAIRDVLCLQAKTGMHGTEVDRLASGDGKIAVLKDQGEIAATVTFKHKTGKPFTLSLDVQGLAAAQRLQARGSAPDRQTIREAVERVCARTSLEFVHFGAIRHSFATWLVEQGSIYNPKGGGLSLEAVAQALNHSSTRTTALHYVSATVPPMYVVPIRLEHSNDPSELRIARAPAG

SEQ ID NO: 6 - protein, 388 aa, Angiococcus disciformis
MTDDSTPTDETQIEAPTPENTSDLKGARPRLRFTIETTTYETLRTLERRGNGEVVLLAERHLPHGLAGLVTIKRLRNPVTFERCQRLIEEVQLSFRLHHPAIAQVHHLKIHADRPHVIAEYVDGPTLDTIISLATMREKPLSAPFALYIAAEVADALHHAHTLRDSENRPLGIIHRDVAPRNIRVARSGEVKVTDFGATYSLMVGREETPGLLLKGDVAYASPEYLNRKPMDGRSDIFSLGLVLMEMLTCKHLFDVEDEKAPNATVDVKTEETPSVPLTQMIALVNRYRPEDVENAMAGLPDALKAIVHKALQRKLSERYATAAEMRDALRAALAAESQPFGRKEASEELARMLSEASVLRDRVELDEEGIFPEGLDADEPTPAPNEE

SEQ ID NO: 7 - protein, 640 aa, Angiococcus disciformis
VEEKLGAGGFGAVYRARRGGRLYALKLIPLWGLAEWAEREVAILLRLKHSNLVRIRGHGQWPDEAPQSFFIVMDYVEGRRLDVWAREENPSAREVVLKVRGVARGLGAAHRAKVVHRDLKESNVIERTSDGEAVVVDFGAGGYESAPSITGGVLPPGTPEYRAPEAWRFQQEHGDERGHSYQPGPSDDLYSLGVVLYWLLTGRQPFLPDEAAGVEAVLNRAPKPPHVLNPRVPEALSAVCMRLLAKEPEERHPDADALCAELEALLAQADESWDVKLCDAYGPDTATTLAAVPHAGEDELVQWLKKRKARPRRGPRPPHGEGAHEPDSNAVAIQAELPPPVPARPGPMPSPPPAQAGHFKALRVATWMGLLVVLSAGALVIARTLAPSPAPAARHALEPHPSDAVDSPPASPEFDLAPWAPGQEVAAPWMAPEAQEAAAALDSAPTLAAVALPATISEEKASVKMKKNTGVFSEPEPQRFRGGTVGKALGLGVAGCLAMACPGPQVRPTPPPEACPPGAVEAMSRLRIEYDEDVVATFFATAEEGVSRNITVRAGPTTVHLGRPLGNLPARTTLSGRLIIGEDRVYGRLTEARTPKGDRFPVCMQIIENDSIGFKKEINDGSNSASVYPYFDVKAVRRFE

SEQ ID NO: 8 - protein, 306 aa, Angiococcus disciformis
MSPIVVLLVIALFSGAAAAQSRPAATGLGVRRIEFSAENFEAMTTPEVQISPGVSTTFEFNSALLQEKVAVEGADRFSLVDIGRSTLRLVPSEQVLPGERLRVTVRFLDGAAPVGMAFILVAHPAQAERLVEVWRNQRTVESYQQESKEARAEAQRCHEENERLRAEYAGPGGLAGLLANRVIGKSGVSVKPLDFEKEVRQRPGDAIRILRAWSYRSANRVSVLMDLDYPEAAQRWIAQGASLVSKTGETLSMLPVWQEAPVANARIRRLVVEAEAEPDAAQDTFTLKLWESNGLRTITLSGVTFP

SEQ ID NO: 9 - protein, 180 aa, Angiococcus disciformis
MTLYELFEADDDRDVPADFPWLLIEIPEEQLRHAALLLNEGEWRPSHISGIWYRVDPERPAQKQQRHVHVAAKKHIKIPTKQASWNRDTTRHDRKTFNAKLGSQGSYQDVAKTALGLPPEAVLEHVVENPAEQQMLLTESTDPQLKTEFYRWLEAQPRRSNFEALVEDAVRLNLPLDLES

SEQ ID NO: 10 - protein, 390 aa, Angiococcus disciformis
VALQRRHPLLRAKIVAGTPPRFTSQGVPPIALEVVERKAEESWQQHVEAELDRPFNSDPGPLVRFILVRGEHRSELLCSYDHLIGDAHSGIFALRDLLQVMASQDQHLPELAPRPAYEELIGPMVPGTRLLGAAVRRGSSALLRLSPTLNTLTERLVAPRGMARSSAEGQALYSHRILEPEQLARLLARCREQGSSVHAALGAALLIARAESQGAKKRVTLTLTSALDARERFGVGEDFGLFTTGKTDFFRARGSTPFWELAHRLRSPLQAARKKRSHLRLFRLILEISALTVDISSQPWMERATRLGLHSMLALSNVGRVEIAARYGNLTLEGLGFTGTTAAQFDVVLTAITFAQRLEASFLFNTAHMQREQVEQLASRTWELLAEATR

SEQ ID NO: 11 - protein, 1541 aa, Angiococcus disciformis
MTLDSRYANRGGGLYEIDGLAIGHSPPPCSIPGGVQLTATATAEHALKALRAKGLATSDEALPAVRHASGEKAPLSSSQRRMWFLEQLEPGNAAQHLLQSHHIQGPLQVEGLRRALGLMVKRHEALRLVVAIGAAGPEQRVRPEWWPELPLSDLSGVAQADRARALAELARVEAAAPFNLQQGPLFRVRLARLAETEHVLLVTLHHLISDGAWSCEVLIKELAMLYGQHVEGSSPELAPLPVQYRDYAGWEASFAPAGEALEAWWRQRLAGVPTVLELPTEGARPLRQTYRAGRVAITVQPRLRQALEDLAHKEGVSLFALLLTAFTTLLHRYSRQEELVVGWPAPQRPRPELHGLIGYFGTPVALRSRLEPHTRVREALRQLDQEVREANAHAALPFERLVSLLDIARSPSRHPLFQVLFDLLPEQPQPTAGGCAFRPWESFTGLVAYDLTLLLEPRGEGLEGALDYSADLFSEARMQRAATQYLHLLEQLVERPHERLSRLALLTPGEHEALLAGHGLGGPVEGAQVLAHHRFEHQVRLTPHHPALCFGPQVLSYEQLNRRANPLAHRLRRLGAGPDTLVGLCVERSLELPVALLAIWKAGAGFLPLDVNQPRERLAFLLGDASCRILLTQEHLLQRLPPTNAALLCLEREAEALEREPQEDAPHEAGLDNLAYVIHTSGSTGTPKGIAMVHRCLANLVAWQLTHERLGGPSRTLQFASLNFDICYQELFTTWAAGGTVVMVTEEVRRDPARLLEVLEQEQVSRLYLPFIALQQLARVADERGAAPRHLRQLITAGEQLQATPELQRLLSRMPECTLHNQYGPSECHVVTSHDLTREPSRWPRLPPVGRPLAHLRVLLLDGEQQLVPPGVAGEVFLGGPALARGYLGRPEQTADRFVPDPFSREPGARLYRTGDLARLREDGALEFLQRMDAQVKIRGYRIEPGEIEVVLCEHPAVHQAHVRPYVDSAGERRLVAYVAARLEDTDGAETEHVERWRAVWDETYGGPSGTAFDLAGWNDSVRGEPLPPEQMREWVETTVERLMELVPRRVLELGCGSGLLLRRLAPRCESYWGTELSPVAVERLREQLQTGGSPLAQRVRLMAQPADDFSGLPEAGFDTVILNSVTQLFPSVDYLLRVVEGALRVLQPGGTLFIGDVQNLRLFELFHASVALEQASADLEAPALLARTRQRMLLDERLYVDPDFFAALATHFPQLGAVRLHLKRGSGRNEMNRFRYDVELQLAPVAKAGPAQELPELDWRHEGLGLERLERMLAERPAGLVLRNVANARTADEAARLALLRTGNSVGRLRALPAVTSWNPEQLWRLAEAADYTCHVTWSAQDEEGRFDALLMARAAGSSRPAAWLTPPPPPPRPWKSYANQPLAASRRRTLVGVLRSHLEHKLPEYMVPSSFVLLDALPLKPTGKLEVAALPPPEPAQAEQTPGHLAPRTPTERRLAELWRRVLGVHRVGVEDNFFQLGGHSLLATRLLSLIRGELGLELPLRVLFEQPTLAAMAGCLEAQSWSTQAPHPPSASIEEGEL

SEQ ID NO: 12 - protein, 3515 aa, Angiococcus disciformis
MTPSGDEALQSSIALVGMAGRFPGAPDVESFWRNLVAGVESISFFSEEELRQAGVSEQIRRRPEYVPAKGVLEDLELFDAGFFGYSPREASHLDPQQRLLLECSWEALEDAGLRPDQLPGWVGVYVGAGDTSYRFQLLRGHGDPLSGSKDVAGFFGNYPDFLATRVAYKLNLRGPALGIHTACSTSLVSINMACSALRGFECDMALAGGVSLRLPARSGYLYEEGGVASKDGHCRPFDARATGTVTGDGVGVVVLKRLEDALKARDPIHAVIRGWALNNDGASRAGFTAPSVEGQSEVIALAHAAAGISARDITYVEAHGTGTPLGDPIEVAALTRAFRAHTADTAFCTLGAVKSNIGHLDAAAGVAGVIKTVQALRHRLIPPTLHFERPNPALHLEQSPFFVNTQPLPWESPRGPRLAGVSSFGIGGTNAHTLFEEAPPPPASGPTRPNQVLLLSARSTSALEHIAGRLAAHLRRHPDLELADVAFTLQVGRARFPYRRALTCRTLAEAMERLEAPEPRPPEPLAHEGERPPLVMLFPGQGTPLVGTARALHESEPTFRQAVEQCARLLRQTLGLDVREVLFPSAEQEEQARRLAAQTRVAQPALFTLEYALAQTWLGWGLQPQALAGHSLGELVAACLAGVFSLEDALQLVAARGQLMQGCPPGAMLAVPLPEAELAALLGSELCIAAVNGPRACVASGPLPAVEALTAALESRGVSSRRLETSHAFHSASMEACQGPLTTLLRRMRLQAPRLPCVSGLTGRWLTGEEATEPTYWARQLREPVRFSEALETLWSLKEPVLLEVGPGTTLTALARRHPTRPARTQEVASLPVQPDTAVPCIEEAVGELWQAGLELDWSALHAAPRHRAHLPPYPFERQRYWIEPEAAPQPRAQQPTPASLVPPEQPSREALEDWFYVPTWEQAPATSGGGQPLAGPVLAFMDSSGLAEQVLAALWPADSGALLTRVEPAGHYEQLSEHAFRLRPESEEDWDALFQALQSQGRLPRRILHAWALTAEPGPCTPDGEAVLEQGFFSLLRLARALGRHAPERPVQLEVLSSFVHAVGPREPLEPLKATLLGACAVLPLEYPHVQCRTIDVRPGSEPREVLVRSLAAELAAPMGESPVAWRDGQRYVRRATRQRLEASRPLRSLRERGVYLVAGGLGGIGLVLARALAQRARARLALLTHSPFPPREQWEQWLEEAPAHPEPAWRSEADPSERRRTQHRIRCLLELEQLGAEVQVYTADVAEEAAVRSVVEQVHARWGKIHGVLHAAATFDDGVIQLRTHEQSSRALRTKVRGSMVLHEVLASEGLDWFALCSSLASALGSFGQADYCAANAFQDAYAHHLRRQGFTGALALDWGTWRDTGAAMRLVARTRRGGHEKPPTPLTHPLFDCEQREPGGTHWLGLTLRGGEDWVVDEHRLQGVPTLPGVAYLELARAACAQALGAEAVELAELLLLEPLTVPRGESRQVRVVLQPEGQAHALRVESRSEEARGWNEHARGRVRAVPRLAERIQPELLRAACEHEQPVPGEPQEQGPVHAGARWHGLFQWVRRGPRQALAQLALPEPFHGDLERFELHPALMDMATSFAIPGGVPWLAFGYERVLIHGPLPPQVLSHVSLPEESQAGAQQLRLQVRLLDLEGWERVRIDGYLLRPLKPSDASVEPAAPNVEVAVGTPGLLESLGLRRCTRPAPGPRQVEIEVEAAGLNFLDVLGALGMMPALEAEESVLGRECSGRIAAVGEGVSGLRVGDEVLAVAPGCFRSYVLVDESQVVRRPASLGLAEGAAQMVPFATAYFALHTVGRLRRGERILIHAAAGGLGLAAVQLASRTGAEILATAGSEQKREYLRSLGIAHVLDSRSTSFVSEVRERTGGRGVDVVLNSLAGELLLAGLSVLAPHGRFLELGKRDLYADQQVGLRTLARGQTFAAIDFGPHHPDFRAVLEEVATQLTQGQLEPLPTRLFPARQVAEAFSFMARALHIGRVAVSMQGATALPASMTRGSRPAPVAVPPWEDPRLAGGISSEEGAEAFLRALEQGAPQLIISPQDFSSLLRGLGGSQGVREKERLVTGRAAAAEPQALPPSSLEQLIEQVWRKHLGVERVQPTDSFFQLGGDSLLGIQVAADLRRHLGVELPTATLFSHPTLAALAAALRARQGEAAAPTAPAPALVPDPAARFEPFPLTDVQEAYWVGRRSAFELGGVAAHGYFEIESPGLEVERFIQCWRQLLQRHDMLRMVVLPDGRQQVLEQVPEYTPEVVELRGLSPQEAESRRLQLRERMAHQVLRSDRWPLFELVLCRYEGGVRIHMSMDALMLDAWSSAVLRQDFAQLYHEPGRPLEPLAITFRDYVLAERRLREGEAHERARAYWWARLDTLPPPPELPLVKEPSQLEHARFTHREARLEPHRWARLQERARAHGLTPSAACMAAFAEVLARWSRHPRFTLNLTLFQRLPLHPQVDELVGDFTSLVLLEVEAHAASTFAERASRLQAQLWRDLEHGSVSAVQLIRELVRTGRRSPGAIMPVVFTSILSLDARRGPQGSLSFFEGELVYSISQTPQVWLDHGVHEEEGALVLAWDSVEALFPPGMVDDMFHAYQRLLGALAEEEQAWEGELPELLPPAQRELLARYNATQAPRPSGRLEEGFFTQARLHPELPALLAPERTLSYGELARRAQALAARLRELEVQPQELVAIAMHKGWEQATAVLGVLQAAAAYLPLDPEQPPLRLHQLLEEGPARVVLTQSSLLHTVPWPPGVQVIAVDELEPATEAPPLPPRGTPEHLAYVIYTSGSTGKPKGVAIEHRAALNTVVDLNTRFGVGPEDRVLGLSALTFDLSVYDVLGLLGAGGALVLPAAEAEKDPAHWWERLVAGRVTVWNSTPALMLLLVEYAEQRGLKLPAALRLVMLSGDWIPVALPDRIRALGRDVQVVSLGGATEASIWSIAYPIGQVAPQWKSIPYGMPLANQRFHVLDGRLEARPWWVPGELYIGGEGLAREYWRDEPLTATRFIRHPRTGERLYRTGDQGRMLPEGSIEFLGREDLQVKVQGFRVELGEIEAALAQHPALSASVVVARGEPRGVRRLVAYAVPRSGQTPAAGELRRYLAERLPAYMVPSAFVLLESLPRSRNGKIARDQLPEPQQTQGLAAQAAAADPLVERLAALVKEALRLERVEPQDSLLDLGADSVALIRLINRLEAELQFRPRLADIYENPTVQGLATLHQEKTKSQGEGGAPRLTAPRSTLLPAEEWGRFKANRPGLRRFPDGTPEVALPGSGLAPAPEELTALERRRSVRTYSLEPVSHEQLGRLLAPLREWEVQGSRRYLYASAGGLYPVQLYLHLKPGRARGLEPGTWYYDPSTHRLVLLSAGAGLDRRIHDPHQNQAIFDSAAFSLFLIARMGAVEPVYAEHALHFATLEAGLMTQLLDLGAAPSGLGLCHIGDLDFAQARGLFHLEEEHVLLHSLVGGVLPTRGQEAASVPAEGGTEARQLAQLLQQVKTLTPEAARALLEARRGSKGRPHE

SEQ ID NO: 13 - protein, 2837 aa, Angiococcus disciformis
MSHDTQLEGAVAVVAMAGRFPQAPTLEDYWRIIHEGVDAFTQLTDEQLLASGVGPSLLRQPGYVRRAALLDRMDQFDAAFFGFSPREAEVLDPQHRLFLECAHEALERAGHGSERARGRVGVFASASLNSYYLHSLHGNARLREVLGDFQLAIANDKDFLPTRVSYKLGLRGPSVAVQTACSSSLVAVHLACQSLLNGECALALAGGSSLSVPQAQGYLYQEGGIASPDGYCRPFDAAAAGTNRGNGVGVVLLKLLEEALADGDTIHAVIRGSAVNNDGAHKIGYTAPSVEGQASVISEALEVAAVSADSIGYVEAHGTATALGDPIEVQALTRAFRKHTERRGYCALGSVKANIGHLDAAAGIASLIKAVLVLERRQLPPCPHFTSPNPRIDFERSPFYVSGRGQPWEPVDGPRRAGVSSFGIGGTNVHVVLEEAPPRPAPRRAARPYQLLPLSARTERAREEVEARLREHLRQQPQEPLEEVAHTLQVGRRHMAWRTALVSSSPAQAVELLERRRPEALLRGQSAAQARSVAFLLPGQGSQYVGMGAALHESEAPFREQVDLCAGKLQGVLGLDVRRLLYPGPREREWAQERLRETRVCQPVLFTVEYALARLLEAWGIRPTALLGHSLGEYVAACLAGVFSLEEALEVVAARGQLMGSMPPGGMLAVGLPAQEVEPLLPAALALAAHNSPQACVVAGPTEPLAELRARLEQRGIACTPLAVSHAFHSPMMEPAVAPFVARLRRMHLRPPSLPFISNVTGTWIEAEEATSPEYWGRHLLQPVRFAQGLERLCEGVQPRLLLEVGPGHTLGRLAARQSSGPVQVVSTLGSSREESSEVERLLTAIGRLWVEGAEVDWAGLHRGERRRRAVLPTYPFEHQRYWVETAPQPSPPERPGTPAESPVTSSFYVPGWSRAALPSAAPSRRVGRLLLLAEAHGWSQGLAERLRARGHSVTLVEPGERLERLTPEHWRLPPGRREDFQRLLEDSGELPSRVLHLWLLGSSQSPQERGFYTLLALAQALGAHGTRPAVELTVVTDQLYAVAEGEPIQPLKALLQGPASVLPQELPGCTCRLVDMALPPGGVAEELLERLVAEVESTASERSVAYRGAARWVREFVPVPLPPPEPSQLPLRQRGVYLIVGGLGGVGLALAEHLARRVSARLVLTGRSPTPPRESWSAWLGTPTRLRLSQELEWLRGAAEQIEHQRPLHSLADSPGLEESLRLLCASYLYHFLFPLQAPLRLGEPRAMQALRERLGLQPGFERLFSFMIGTLEQAKLIRVGEGMLEGQVEPAHVPTPRALHERLLEGYPEVSGLLELLEHCVRHYPEVLRGSLPALSVLYPSGRSEEDSARSGVEWSSMGQCVALLRHFLARHAERTQGRTLRILEVGGGSGVVLQALLPLLRHHPVEYHFTDIGPSFVRAMEGVGRRQGLTFLHTSVLDISRPPPEQGHPPGSYDLVIALNVVHATPRVPQSLAHLESLLVPGGHLCLVETVKQQPWVDMIWGLAEGWWSYEDELRTRSPLLEVGDWEHALRDVGFAEVEVLPAAVEQRSRWDNVLLIAQRPGESGLQPVGGRAAMQERIRRLRAIEEAGGEVLPLVADVTDRERMGEVLAEVKRRHGALHGVIHAALVLEDGLMQLKTRESAGRVLASKVEGTLVLDELLRDEPLDFFVLCSSLSALLGALGQADYAAASAFLDAYAHSQRGRTDRRTISMDWDRWLEVGAAMRLGLGLAAGALGLQRTAPGEYTVRWQAERCWWLDEHRLEGRATLPGVAYLELVRAALVQELGEAPVELEQLVLLSLLEAPAGEEVEVRFHLRPEDEGYALEIRSRAGGLANGGWRSHAMGRVRMLPRGSARPTHPLRELEERLGLTQAPREHEPAQGPRELAPALGRRWSSLSWHRAWKGEEGLALIELPEELAEDLRQWPLHPALLDAATGFAPLPPGAWLPLSYGNTRIHGPLPRQLYSHIRRLEPASAQAGVVRLEVRLMDGEGRELLCVEEFVLRRVEVDSLARPQPAGKAPRQAVLPRPGALDSLRLQPLERLPPQEGEVEVQVLAAGLNFKDALLALGALPVELANGAPLALGVECAGIISAVGPGVRGLRVGEAVVAAAAGAFASHVRVPQEQVFPKPAGLSFEQAAMVPVTLFTAWYALEELARLRAGEHVLIHAAATGVGLAGVKLALRRGATVYATAGSEPKRELLRSLGVTLAMDSRAPGFDDQLLQHTQGRGVDVVLNSLSGEFLSRSLGVLARHGRFVELGVRDMLSGGTLPLAPFERGLTFLAAQIDPGMKGYRELMGEALRQIERGELEPLPYTAWPLERVAEALQLVSKGRHVGKVVLTPEEPLSRPPALPSSSRPVQPRAGVAIVGLRSAEGCEAFERILAAGLPQVAVSTRELRARMAEIERLRVSSWEPALPSVPRGSPARTERSKPYVAPRTERERALAALWQDLLGVSEVGLDDDFFELKGDSLLAIQLMGRLRKELEVELPLSSFLARPTLRTLLSAMPAPATDEPASATGAIPAAAPQPSPAVSSEPARKWRHLVPIQPQGESPPFFWAAPLMGTVFPYFTLARCLAPTHPFYALQPPGLQEGQEPMDKVEELAALYVRELRELQPRGPYRLGGWSFGCVVAYEVALQLEAAGEQVALLSLLDFPAPSGQRASLWATARFFSGSVLRGLAPYTLDYLYLAARAPLNPDAASRLSSSLTRGWERLRKGGLVQELLDHAAMARVVPEDSRLLLLREPGIAPMLRLTRAHQRAMLSYRPRGRLRQRIVLFRTSEQAWSFARDLGWGALSASGVDVREAPGDHMTLLRPPHVERVAEQLRALLSSAPLPTRR

SEQ ID NO: 14 - protein, 385 aa, Angiococcus disciformis
MKFPPASLCFVLPMLSATSVQAQAPETWTEHWFEHNQTVSRVYQDNDVAVYFDSAVNRSITWPNTYLGDVWRYTKRTYGHFGTDSQLYTIFHAGKYSGGHPSTYFDASHDRRNVIDVGSSSPTAWTAGTGNDLDIVTHEVAHIVELASKGVHDSPAFGLWRDSKWAEIFNYDVYLALGRTSDANRWYNLMVNTTDSFPRANTHWFRDWFYPIYKNHGGSSVLNRYFVLLAQYLPKNGSNYARSLNWGEFIHFWSGAAGVNLKTLATSAFGWPAEWEAQFTQAQRDFPFTYTPPGPTAVTVFQDQNYGGYGMALPVGRYTLSALHAWGVRNDDITSLKVASGYKVTLYEHDNFSGASLTKTADDASLVDDSWNDKMSSLIVSASGM

SEQ ID NO: 15 - protein, 252 aa, Angiococcus disciformis
MFDATRYLERIGVSAGTPLAALHRAHLEAVPFENLDIHLKRPIRLDEAAFFEKVVLQRRGGFCYELNGLFARLLRTLGYRVTLLSARVASRPDGSAYGPDFDHLALLVEDASGRWLADVGFGECFLEPLRLDERGVQTQDGRGHRLVEDAEGLVVWREAASGDWKAQYVVSLIPRELGDFAAMCHHQQTSPESHFTQRRLCTRTTPDGRITLKEGALVVTSGGARHEQRLPDEAAWRAALTRHFGITLPSGG

SEQ ID NO: 16 - protein, 308 aa, Angiococcus disciformis
MTTSKVRSGATLGGVTARFSTGEQPAPKKYVDYTVKSGDTFSGIAAKHELSLAALKKLNPQVENINVIHPGQKLHVKVVNAPAPEPKPTPKPPTNKNTSVLPKGIPNTEGMSQAKEYALYSKYVEKYGDAKAKQDLAAGKRVIVGLRVNTPFTRDRPSGGSYDDRLVVMWKDSSGKPHVQEFKANTEPNRRWADDPSQSTKPVGRLVGNKTYHYRKSFNGNFGGNILAPDLRYGNPTVRRDTNRDHRINSKDDVFSGDWGGQGYYFHRGGTTDTYSAGCQTMDQGRFNNFWAALGSQSEFSYVLAQVG

SEQ ID NO: 17 - protein, 293 aa, Angiococcus disciformis
MTRVEQLRDLETAKQGAALLEAENARLHQRLEALVAENARLKGEDAQAHLHHADETHWLLLDKGPGTKWYAWTVASPDTVFHRIYPSRSGATARTVLGDYEGVVLVDGYAAYQTATKSSADGPCPATLAFCWAHVRRKFFEAQQFAPACKEVLDLIGELYAVEADLPGWYALEGEERQAALAHRLAVRQQKSAPLTERIRDWAHAQRALPGSAFRKALEYMLNLWAGLTVFLTQPQVPLDNNHVERQLRDMVIGRKNLKTARLRGEAPGHYLRRPALAAIENPGTVTLPKAQS

SEQ ID NO: 18 - DNA, 82868 bp, Angiococcus disciformis
  CDS (72)..(1148): ORF24
  CDS (1550)..(2812): ORF23
  CDS (7660)..(8214): ORF19
  CDS (10083)..(11138): ORF18
  CDS (11229)..(12284): ORF17
  CDS (47447)..(48664): ORF1
  CDS (48674)..(49795): tubZ
  CDS (49813)..(50472): ORF2
  CDS (61715)..(64060): ORF7
  CDS (68036)..(69034): ORF10
  CDS (70676)..(72319): ORF12
  CDS (73312)..(75552): ORF13
  CDS (78163)..(79416): ORF15
  CDS (79561)..(82866): ORF16
attacgaattcgcggccgcaattaaccctcactaaagggatcaatcgaaagcacctcgagattcgaggtgtgtggggcgtggacttcagccacttccaccggatgctccgcatcctcgaccggcacggtgcgagggtcgccggtggcaagggctgggagcacatggtcagccgcacctacggcctcgaagaggtgaatcaggccctggccgatgtcgagacgggtcgcatcgtgaagggactcatccgccccaatcccgttcgtacctcgcgatgacggccgattcgatggatgccaccgtgccctcgcggaggccagccctgggcttcatcggcggtggggtgatggccgaggccttgattggagcggtcaccgggggaggcctggccgcgcccggcacgctcctcgtcggagaggtcgacgaggagcgtcgccgggtgctccgcgagcagtatggcgtcgaggtgaccgcggacaacctcgcggcggcggacgcggaactggtcgtgctggccgtgaagccgcaacacctgggtgttgtcctccagcagctgcgcgggcagctccgtgaggacacgattgtcgtcagcatcatcgcgggcgcgcgcctgcagacgctgtgcgagggtctcgaacacccactcgtcgttcgcgcgatgcccaacacccccgcgcgggtccgcaaggcggccaccttctggattccaagcgcgggcttgagcgagccggcgctggtgcgcgtccgctcactgctgggcgcgctcggcaccgaagtggaggtcgccgacgaggccggcgtggagatggcgacgggcctcgccggccccatgcccgcgttcgtctatttcctcatcgaggcgttcatcgacgcgggcgtggccctggggctgccgcgtgatcaggccaccctggcgacggtggagagcatgcgcggaagcctggagttgctgcatcgcagccaggagtccccggcggcgttgcgcaagcaggtcacgagccctggtggcgcgacgctggccggcttgaaggtgttcgagagcgcgggcgtccgggatgcgatggacgcggcggtgcgcgcggtgcacgcgcgcgcgcaggagctcgggcggcttccgctcgccccgctcgagcccgggaaagagggctgactcctggtaactcctcgccgtaccccctcattgccgaggtgacggcccgctcacgccagcagcgccgagagcgggaacgacgcaagcgtgaggcttcgctcgggagcggcggctaaaccggaagcggatgagagtccaagagaacccctcatacgacaactatcgtagttctcaccgccccgaagcctttacgacggaggaaggacggtgttcccctacgcgggtccgtgggcaatccgtgcccgggacctctggagttccccatgcgaggttcgttgcagtccttttccctggcgatggtgttcctcgtgggtctgctcgcgggccgtccctcgtcagcccatgaatcgctccgtgagcgcatcgatgccttcgtgcgcgcggagcagaaacggatgaatgtgccgggcgtcgcggtggccgtcgtgagccacggcagggtcatcgtggcgaaggggtatggtttctcgaacctggagcatcaggttcccgtcaccccggacaccctcttccagtccggctccctgggcaagcagttcaccgccatggcggtgatgctccaggtggaggcgggccgcatctcgctgtccgacagcatcacgaagtacttccccgacgcgccctcgacctgggcccccatcacgattcgccacctgctgacgcacacctccggcctctcggatgggctgctcgacctgcgcaaggactacaccgacgaggagttcgcgcagttcctctatacgctgcccctggacttccccgccggcctgcgatggaactacagcaacgccggctacgtcctgctgggcctcctggtgaaccgcgtcgcgggcacctcctacgtcaacgtcctgggcgagcaggtcttcaagcccacccgcatgaagacggcgcgaggcatcagtgaggctgacattgttcccaatcgcgcggccggttaccgcctgctcgacggggtggtgaagaaccaggagtgggtctccccctccctcaacaccacggcggatggctcgctctacttctccctgaaagacatgctggcgtgggatgacgccgtggatgaccgcgccatcctgacgaacgggagctggcgggacatcctgagtcccgtgaagctctccagcggagcttcctatccgtatggcttcggatggttcatcgaggagcgcaacggccagctcgtgcaccagcacgccggtgcatggcagggcttcaagaccgcctactaccgcttcaccggagacgccctgtccatcatcgtgctgctcaacctcgcggagccgaaccccgcggccatcgccaatggcatcgccgccatcgtcaaccccgcgctcgccgtgcctccgctggcccccattccggacctcgaaccggaggtcacggcccggctcgcgacgctgctcgagcaggcacgggccggagcgctgaaccctgccgagttcgcgtacgtccccgggtggttcttcacggaggccgcgccgtattaccagtcgctgctacagagcctgggaccgtcggggccgctcgtcctggcgaagcgggagatgcggggcgatgaccgcgtctacacgtacctggtgcaggccggctccacgatgctgcgctaccgggtggcgctcatcccggatggccgggtgtccgccttcgcgctgagcccgaactaagagctgacccgcccgggccgcacagcgggagcggtggtcagctctgggccttcggcagcgtcacggtgcccggattctcgatggcggcgagcgcagggcgccgcaggtagtggcccggggcctctcctcgcagccgcgctgtcttgaggttcttcctgcctatcaccatgtcacgcagctggcgctcgacgtggttattgtccagcggcacctgcggctgggtgaggaagaccgtcagccccgcccagaggttgagcatgtactcgagggccttgcgaaaggcactgccgggcagtgcgcgctgcgcgtgcgcccagtcgcggatgcgctcggtcagcggcgcggacttctgctgacgcacggcgagccggtgcgcgagcgcggcctgacgctcctcgccctccagcgcgtaccagcccggcaggtccgcctcgacggcgtacagctcgccgatgaggtccagcacctctttgcaggcaggggcaaactgctgggcttcgaagaattttctcctcacgtgggcccagcagaaggccagggtggctggacagggcccgtccgcgctggacttcgtcgccgtctggtacgccgcatacccatccaccagcacgacgccctcgtagtcgcccagcacggtgcgcgccgtcgccccggagcggctggggtagatgcgatggaagacggtgtcgggcgaggccaccgtccacgcgtaccacttggtgcccggccccttgtccagcagcagccaatgcgtctcatccgcgtggtgcaggtgcgcctgggcgtcctcgcccttgagccgggcattctccgcgacgagcgcctcaaggcgctggtgcagccgggcgttttccgcctccagcagcgccgccccctgcttggccgtctccaagtctcgcagctgctcgacgcgcgtcatgactacctgacaggtgcggcaggacgctcgctgacgtgcaccggcaccagagccgcgcccttctcggcgggcttcggacggcggtgtcccgcggggcgccccttgcgccactcgtagagcgtcggcccggacacgcccagttgctgcgccgcgtccgtcaccgtcccacccttcgccatggtgtgctcggcgtagcgcaccgcgaaggcgcgcagcgcctcggggaatggcaacgagccaccgcgccgcccggccttcaatcgctgcgcttcctgacggaactgctccagctccttctccatggaccacctcctggcgtgtggccaagggaagtctcacgaaggctggagcccgttacgacggggcacggcgaggtcttacgactcctgctcgcgcggcgggtgtccgggtcttccggatggagtgggtcccctacgccacgtcagccgacctgggccaggacgtagctgaactcgctctgagagccgagcgcggcccagaagttgttgaagcggccctggtccatcgtctggcagccggcggagtacgtgtcggtcgttccgccgcgatggaagtagtagccctggccgccccagtcgccgctgaacacatcgtccttcgagttgatccggtgatcgcggttggtgtcgcgccgcacggtcgggttcccgtagcgcaggtccggcgcgaggatgttgccaccgaagttgccgttgaagctcttccggtagtggtaggtcttgttgccgacgaggcggccgaccggcttggtgctctggctcgggtcatcggcccagcggcggttgggctcggtgttggccttgaactcctggacgtgcggcttgccgctgctgtccttccacatgacgacgagccgatcgtcgtaggagccgccggaggggcgatcacgggtgaagggcgtgttcaccctcaggccgacgatgacgcgcttgccggccgcgaggtcctgcttcgccttggcgtcgccgtacttctccacgtacttcgagtagagcgcgtactccttcgcctgagacatgccctcggtgttcgggatgcccttggggagcacgctggtgtttttgttggtcggcggcttcggtgtcggcttcggctcaggcgcgggcgcattcacgaccttcacgtgcagcttctggcccgggtggatgacgttgatgttctcgacctgcgggttcagcttcttcaatgcggccagcgagagctcgtgcttcgccgcgatgcccgagaacgtgtcaccgctcttcacggtgtaatccacgtacttcttgggggccggctgctccccggtgctgaacctggcagtgactccacccagcgtggcgccggaccggaccttggacgtcgtcattcggggcactcctgaaaccgaaggtgtctggctggattgtcgaaggtgcgggctcgaagtttcttagaatttgatccatcaccggccccagtgccagcagggcaaacggcgagtcctttggatttctacgctcagtgaagtgctggcggcctgcggacccgtcccggggccttcacggcggcaggtagagtgggccggctcctcatgtgcgtccggagcggcgtcatccgccggagggcagggtgatgccgaagtgccgcgtgagcgcggcccgccacgcggcctcgtccgggagccgctgctcgtggcgcgcgccccccgaggtgacgacgagcgcgccctccttgagggtgatgcgcccgtccggcgtggtccgggtgcagaggcgtcgctgcgtgaagtgggactccggcgaggtctgctggtggtggcacatggccgcgaagtccccgagctcgcgcgggatgagcgagacgacgtactgggccttccagtcccccgacgccgcctcgcgccagacgacgagcccctccgcgtcctcgaccagccggtggccgcgtccgtcctgggtctgcacgccgcgctcgtcgaggcgcagcggctccaggaagcactcgccgaagcccacgtcggccagccagcggcccgaggcgtcctccaccaggagcgccagatggtcgaagtcgggaccgtaggcgctgccatcgggacgcgaggccacgcgcgccgacagcagcgtcacccggtaaccgagagtccggagcaggcgggcgaagaggccattgagctcgtagcagaacccaccgcgccgctggaggacgaccttctcgaagaaggccgcctcatcgagccggatgggccgcttcaggtggatgtcgaggttctcgaacggcacggcctcgaggtgggcccgatggagcgcggcgagcggcgtacccgccgagacaccgatacgctccaggtagcgagtggcgtcgaacatgcgcactgtgtaccgcggtgggcccgttgggggcgacccattctccaatccatgggcggcccgccattcccctggcgcgaacgcgccggggagggctcgcgaaggaagcccggcacgccccggagcccgagcggcgctgacctacatccccgacgcgctcacgatgagcgaggacattttgtcgttccagctgtcgtcgacgagcgaggcatcgtccgccgtcttggtgaggctggcaccgctgaagttgtcatgttcatacagggtgaccttgtagccgctggcgaccttcagggaggtgatgtcgtcattgcgcacgccccaggcatgcagggcggacagggtgtaacggccaacgggcagtgccattccatagccaccgtagttctggtcctggaacacggtgacagccgtggggcccgggggggtgtaggtgaaggggaagtcacgctgagcctgggtgaactgcgcttcccactcggcgggccatccgaatgcggacgtggccagggtcttgagattgacgcccgcggcaccactccagaagtggatgaactctccccagttcaggcttcgcgcgtagttgctgccgttcttcggcaggtactgcgcgagcaggacgaagtaccggttgagcaccgaggagccgccgtggttcttgtagatgggatagaaccaatcccggaaccagtgggtgttggcgcgggggaagctgtccgtcgtgttgaccatcaggttgtaccagcgattggcatcactggtgcgacccaacgccaggtagacgtcgtagttgaagatctccgcccacttgctgtcgcgccacaggccgaaggcaggcgagtcgtgcacgcccttgctggcgagttccacgatgtgggccacctcatgggtgacgatgtccaggtcgttgccggtgccggcagtccaggccgtgggggaactggaacccacatcaatcacgttgcgcctgtcatggctggcgtcgaagtacgtggaggggtggcctccactgtactttcctgcgtggaagatggtgtagagctgcgagtccgtgccgaagtgtccgtaggtcctcttggtgtatcgccacacgtcgcccaggtaggtgttgggccaggtgatggaccggttcacggccgagtcgaagtacacggccacgtcattgtcctggtagacgcgggagacggtctggttgtgctcgaaccagtgctccgtccaggtctcgggcgcttgcgcctggacggaagtggcggagagcatcggcaacacgaagcacaacgaagcaggggggaacttcatgggggagactcctgtgcgcctggggatgcgtgggcttccagtgacctccccatagagaatcgagcccctttttcgggttaacgcgaagtttatcggaatgagacggacagcgagttgacccggttcccgtgggaacagctcgccggcagttgagagtgagggaacccgccgtcagcgcgtggtgcggaagcccgcgtagggggacaccgtttttttgcgcggcgcttcgggccagggcattcctggggcctccctctctctcgaaggagcagtacccggtgtccatccgtcgaacgaccgccagcacccgcaatgtcaccgtcagtgcgatgctcgacccggccctgggcagcgcgcgcgacgcgctccaggtcttcctcgagaaagccctgcgcgcccagttcggcgccgactggcaggggacgctggagcgcgaccggctggcgcagggccgtcccacgagcgagcgctgggactggggcagcatcagctaccggctcgggcacttccgctcgccgcaggccacgggcagcggcgtggtgaccgagcccatcgtcgcgctcgcccggctcgccaaggcgtatcgcaacctcttccagcacgaggaactcacggacgcgcaggtgcgccacgccatggaggggctcgcgctgctgcaggaggcgctgggcaacaagacgcgcgcggccgagacgcgcgccgcgctcgaggtgtgggcgggcccgccggcccgcgccgcgaagcgtccggcgcgcaaggccccggcggccgcgaagcgtgcgaagcccgcggcgaagaagaaggcgccgaaggcgaagagcgcccggcgatagggcagggtgggccgcggggcctcagccgtgcgccgaacccgcgcggctcgggccctggaggggccatcagtcgttgtaccgggttgagggcaacgtacgctcccttgaggtggtgggcccgtgggtgagctacgagcagacggatctgagaaggcggtcgtcgcggcattcaaggcggacagcttctcgtccgcaggcacatccgtgacgacgctgcgcgaatccacctcgaacaaccaccgggcctgggtacgagggtggggagggcagagtcaggagccattggctgcaccggggccggtgacgtccgtgaacttcgcgccggtgacgcccgcgcgctccagggcttccttgatctcctcggccacgatcaaggccacggtccagccccaggttcggaacaccttggcgccgtccaccttcgtcgtgtcgatgcgcatcccggacaccgaggagtacacgggcgtggacgacggggatgctgaaggccgcgtgggaatagtcgagcggtttgccggtgatcttgatggggatcctgatgcgctcgtccgaaagtgatttggacgacgcatgcggctccactcagtgacaagcagaagcagccggttcccggctacggcggcctggccgtcacgggccggtgcggcaacctcgaacaatccatgagcgtcgaggtgccgcgtatctttccgggaggcgtcttccctgtgtggaaggggctgctgttcgatcccgcctcgtgggatggctcggacttcttcatgccggcgcaacgcttcgggttcgtgttctgggtggaagacgatttgagaggatcccattcgcattgacgtggcacacgcgaaatcgatttccctgaaatacttcattaccaggctgtatcacaatcacaccagtaaagtaaggctggcacctccggggcggcccggtcgcgtggaacttcacgtctcgaagagaagccagcacacgatgattcgtccgatcctggcccggatctgtcacacgaagggacgcgccggtcaggagggagttgggatttcgcgcaactgtttggcaatgcgcgcgaaaaggtctttcaccggcgccgccacgcttggagtggcccagcaaccatgggattggtggtccgtcatgccttggcagggggattgcccgtgggagcatctacttcgctagatggttctccacctgacggttggctgctcccaagtctgtgagcgcaggtggggcgcacgcacgcaacgcccatttagatagctgcctggcagcccgttgcttttctggctactgcacttccccgatcccctcccatcgttaggacgcgcaatgccttggaggagcggcttggattttcacggccttctacgcacggagcccaaggtcaatcgcacactccagggcaaacgatgaatatgaacatgcgagcgcaagcgggtggaagacacctgaggtgccatgtacagtgagtgaggaatcccggctgtgcatgacactttcgttggggagggccgaaacgtggactacagggacgcggtacaaatacaaggacagacgcccagtacggcggcggcagtgacgcagaagatgcccgtggcagggctgggcaggtacctgagggccatggagacgctccgactcggggccactcgggcaagcagggagttgctgcgcgccatgctggaggtggtggagcaggatttggaagacgcggagtcccatgcacagagcgcggtgccggtggacaagcatggagtcccccatccctccggcaagccagtacctgcctcgccctcgaagcgcttccgtggggtacctccccttcgtgagggcagtgtgccccccgagagccctctgcctggagtgacgaaatgacttcgggcactcggaaaacaggaggcgacggggctcgccggaatgacaagtaccgcatcctcagcctggacggaggaggactgcggacgctgctgtccattggcctgttgaagcgcatcgaccagttgcggcccggcttccttgatcaggtcgacctggtggcgggcacctcggcgggagccatcagcgcgctcatcatcgcggcggctcgcgagcctgccgtggggctcgagcaggcgcggcagatctggttcacgcctgggctgttcgatagcccactctccaatcagctgggggccctggttggccagagcgcgctgatgcccagcgagaacatggctcgcgcgctcacccacatcctgggagacaagacgctccgggacctgaagcgcaaggtggtgatccccgccttccagctggacgatggcgaccctgatgaggacaggcgcgggtggaggccgcgaatcttccacaacttcccgggtgacactttcgtcaacctggatgactacctggtggacctggccctgcgctccagctccctgccgatcgtctcgccggtccatcagggctatgtggatgggggcttgttcgccaacaaccccaccatgtcagccgtggcccaggccatctacgccaaggcggcggatgtgcgggacatcctcgtgttctccctgggcacaggcgactcggtggactacctggacggttataacgagaactggggctggagaaagtggctgctggacccgaagcagcccatggccttcgtggccgccaccatcgaggcgggagtggaggccatcgacttccaggcaaagatgctgcttccgcggggcaactactggagggaggatccggtggtgcccttcaacctgggcaacagtgtggaggcccagatcgccaccttggatcgggtcgtcaagaggcacgatctgagcaaggtgctggagtgggtggagaactcgggctggcaacccaaggccacgcaggagacagcctctggcgcgcagcgtgagttcagtggcgagtcgggagaggcgcggagctgagcaggggttcgaacggcctgacggccacctgcttgacatggggtggccgcagctgcggcatctcgccttcggaccgccggaggtggagaaatgaccatcatccatgggcagccaggagccgacggggctcgccggaatggcaagtaccgcatcctcagcctggacggaggaggactgcggacgctgctgtccattggcctgttgaagcgcatcgaccagttgcggcccggcttccttgatcaggtcgacctggtggcgggcacctcggcgggagccatcagcgcgctcatcatcgcggcggctcgcgagcctgccgtggggctcgagcaggcgcggcagctctggctcacgcatgagctgttccactcatcgctcaggaccagattgggggccatcattggcatgaacgcgctgacgcccagcaagaacatggctcgtgcgctcacccacatcctgggagacaagacgctcggggacctgaagcgcaaggtggtgatccccgccttcaagttggacgatgaaaaccctgacgagaacagacgggagtggaagccgcgagtctttcacaactttccgggtgccgacttcgtcaacccaggagaccgcctggtagacctggccctgcgctccagctccctgccgatcgtctcgccggtgtaccagggctatgtggatggaggcttgttcgccaacaaccccaccatggcagccgtggcccaggcgatctacgccaaggcggcggacctgcgggacctcctcgtgttctcccagggggcgggggacatggtgcactacctgaagggctacaacgagaactggggctggtggaagtggctgttgaactcgaagttgccctgggccttggtggacatcgccgtagcggcgggagtggaggccatcgacttccaggcgaagaggctgctgccgcgaggcaattattggagagaggatccgcgggtgccctctcatctgggcaacagcgtggaagcgcaggtggtcaccttggatcagatcgtcgaaaagcacgatctgagcgaggcgctggagtgggtggacagctcgggctggctgccaaagggcatgcatgaggcagcctctggcgcgcagcccgaactcagcggcgagtcgggagaggcgcggagctgagcagggcccggagctgctctgccacccgctccacgtgaggtggccgcagcagcgtcatatggtctcccggcgcctcgcgcacatccacgcccgaggcgctgagggctccccagcccaggtctcgcgcgaagctccaggcctgctcggaggtgcggaagaggacgatgcgctggcggaggcgacctcggggccgataggagagcatggctcgctggtgagcccgggtcagcctcaacatgggggcaatgccaggctctcgcagcagcagcagccgtgagtcctcaggcaccacccgggccatggcggcatggtccagcagttcctgcaccagccctcctttccgcaggcgctcccatcctcgggtcagggagctgctcaggcgcgaggcagcgtctggattcagaggagcgcgagccgccaggtagagatagtcgagcgtatagggcgccaggccgcgcagcaccgagccgctgaagaagcgggccgtcgcccagagactggctcgctggcccgaaggggcagggaagtccagcaggctcagcagcgccacctgctctccagccgcctcgagctgtagggcaacctcataagccaccacgcagccgaaggaccagcctcccaggcggtagggccctcgcggctgcagctctctcagctcgcgcacgtacagggccgccagttcctccaccttgtccatgggctcctgcccctcctgcaaccctggcggctggagagcatagaaggggtgggtgggcgccaggcagcgggccagcgtgaagtagggaaacacggtgcccatcagcggcgcagcccagaagaagggagggctctcgccctgaggttggatgggcaccaggtggcgccacttccgagcgggttcgctggagacagccggtgacggctggggagcggcggctgggattgccccggtggccgaggcaggctcgtccgttgccggggctggcatggcggagagcagtgtgcgcagcgtagggcgggcgaggaaggaggagagtggcaattccacctccagctccttgcgcaaccgccccatgagctggatggcgagcagcgagtcccctttcagctcgaagaagtcatcatccaaccccacctcggagacgccgagcaggtcctgccagagcgcggccagggcgcgctcgcgctcggtgcgaggagcaacatagggcttggagcgttcggtcctggcgggggagccgcggggcaccgagggaagcgccggctcccaggaggagacgcgcaggcgctcgatctccgccatgcgcgcgcgcagctcacgggtggagacggccacctgcggcaggccggccgcgaggatgcgctcgaaggcctcgcagccctcggcggagcgcagcccgacaatcgccacgcctgcccggggttgcactggccttgaggagctcgggagcgctggcggccgtgacaagggctcttccggggtgagcaccaccttgcctacgtgcctgcccttggagacgagctggagcgcctcggccacgcgctccagtggccatgccgtgtagggcagcggctccagctctccgcgctcgatctgccgcagggcctcgcccatcagctcccggtagcccttcatccccgggtctatctgcgccgcgaggaaggtgagcccgcgctcgaagggagccagcggcagcgtgccgccagagagcatgtcccttacacccagctcgacgaagcgcccgtggcgagcgagcacgcccaggctgcgggagaggaactcgccgctcagcgagttgagcaccacgtccacgcctcgcccctgggtgtgttgcagaagctggtcgtcaaacccgggcgcgcgcgagtccatggccagcgttacccccagggagcgcagcagctcgcgcttcggctcgctgcccgcggtggcgtacaccgtggcgccccgccgcagcgccaacttcacccccgccagtcccacccccgtggccgcggcgtggatgaggacgtgctctcccgcgcgcagccgcgccagctcctccagggcataccaggcggtgaacagagtgacgggcaccatcgccgcctgctcgaagctcaggcccgctggcttggggaagacctgctcctgggggactcgcacatgcgaggcgaaggctcctgctgccgcggccaccaccgcctcgcccactcgcaggcctctcactcctggacctaccgcggagatgatgcccgcgcactcgactcccagcgccagtggggcgccgttggccagctccactggcaacgcccccagcgccagcagcgcgtccttgaaattgaggcccgcggcgagcacctgcacctccacctctccctcctgcggcggaaggcgctccaggggttgcagtcgcagcgagtcgagcgcgcctggtcgtggaagcactgcctggcgcggagccttgccagcgggctgtggccgagccaacgagtccacctccacccggcggagcacgaactcctccacgcacagcagctcccgcccttcgccgtccatgaggcgcacctccagccgcaccactccggcctgggcactggcgggctccagccggcggatgtggctgtacagctgccgcggcagcgggccgtggatgcgggtgttgccataggacagcggcagccaggcaccggggggcagcggtgcaaacccggtcgccgcgtccagcagggcagggtgcaggggccattgccgcagatcctcggccagctcctcggggagctcgatcaaggccaggccctcttctcccttccacgcgcggtgccagctcagcgaggaccagcgccggcccagggcaggtgccagctcgcgggggccctgagctggctcatgctccctcggcgcctgggtcaagccgagccgttcctccagctcccgtagcgggtgggtgggtcgagcgctcccgcgaggcagcatcctcacccggcccatcgcatggctgcgccagcccccattcgcgaggccgccagcccggctgcggatctccagcgcatagccctcatcctccggtcgcaggtggaatcgcacctccacctcctcccccgcgggcgcttccagcagagagagcagcaccagttgctccagctccacgggggcctcgcccagttcctggaccagggcggctcgcaccagctccaggtacgccacccccggcagcgtggcccgtccttccaggcggtgctcgtccagccaccagcagcgctcggcctgccatcgcaccgtgtactctccgggtgccgtgcgctgcagccccagtgctcccgccgccagccccagccccaggcgcatggcggcgcccacctccagccagcgatcccagtccatggagatggtgcggcggtccgtgcgccctcgctgtgagtgcgcatacgcgtcgaggaaggcactggcggcggcatagtccgcctgccccagcgcgccgagcaatgcgctcagcgaggagcacaggacgaagaagtcgagtggctcgtcgcgcagcagttcgtccagcaccagggtgccctcgaccttggaggccagcacgcgcccggccgactcgcgcgtcttgagctgcatcagcccatcctccagcaccagcgcggcgtggatcaccccatggagcgccccatggcggcgcttcacctcggcgagcacctcgcccatgcgctcccgatcggtgacgtccgccaccaggggcagcacctcgcctcccgcttcttcaatggcccgcagccggcggatccgctcctgcatggccgcgcgcccgcccactggctgaagcccgctctcgccgggccgctgggcaatgaggagcacgttgtcccagcgtgagcgctgctccacggccgctggcagcacctccacctcggcaaagcccacgtcgcgcagggcgtgctcccagtcgcctacctccagcaagggagagcgggtgcgcagctcgtcctcgtagctccaccacccctcggccaaaccccagatcatgtccacccagggctgctgcttcaccgtctccaccaggcacaggtggccgcctgggacgagcaggctctcgaggtgggccagggactgaggaacgcgcggggtggcgtgcaccacgttgagggcaatcaccagatcatacgagccaggcggatggccctgctctgggggagggcgggagatgtccagcaccgaggtgtggaggaaggtgaggccctggcggcggccgactccctccatggcgcggacgaaggaggggccaatatccgtgaagtggtactccaccgggtggtgccgcagcagcggcagcagggcctggagcaccacgccactgccgccgcccacctcgaggatgcgcagggtacgcccctgcgtgcgctcggcatggcgggcgaggaaatgccgcagcagcgccacgcactgccccatgctgctccactcgaccccgcttcgtgcggagtcctcctcggagcggcccgaggggtagagcacactgagggccggcaggctccctcggagcacctcagggtagtggcgcacacaatgctcaagcagctccagcaggcctgacacctccgggtagccttcgagcagtcgctcgtgcagtgctcgaggtgtgggcacgtgggctggctccacctgaccctcgagcatgccctctcccactcgaatcagcttcgcctgctccagggtgccgatcatgaaggagaagaggcgctcgaagccgggctgcagccccaggcgctcacgcaatgcctgcatcgccctcggctctccaagtctcagaggcgcctgaagagggaagagaaagtggtagaggtagctggcgcacagcaggcgcagcgactcttccaggccgggactgtcggccagggagtgcaggggccgctggtgctcgatctgctcggcggcaccgcgcagccactcgagctcctgtgagagccgcagccgcgtgggagtgcccagccatgcgctccagctctcgcgcggtggcgtgggcgagcggcccgtgagcaccagccgcgccgacacgcgccgcgccaggtgctctgccagcgcgagccctacgccccccaggccgccgacaatcaaatacacccctctctgccgaagcgggagctgcgaaggctcgggcgggggcagcggcacggggacgaactcgcgcacccagcgagccgcgccgcggtacgccaccgagcgttcggacgcggtggactccacctccgccaccagccgctccagcagctcctccgccacgccgcctggcggcagggccatgtccacgaggcggcacgtgcacccggggagttcctggggaagcacggaagcagggccctgcaggagcgccttgagcggctgtatcggctcgccctctgccaccgcgtagagctgatcggtcaccaccgtgagctccaccgcgggccgggtgccgtgggctcccagtgcctgggccagcgccagcagggtgtagaagccgcgctcctgggggctctggctgctccccagcagccagaggtggagcaccctcgagggcagctctccggagtcctccagcaggcgttggaagtcctcgcggcggcccgggggcaggcgccagtgctccggggtcaggcgctcgagccgctcacctggctcgacgagggtgacggagtgtccccgggcccggagccgctccgcgagcccctggctccacccatgggcctccgccaacaacagcagccggcccacccgtctcgagggggccgccgagggcagagccgcgcggctccaacctggcacgtagaagctgctggtgacagggctctcggcaggtgtcccaggccgctcgggaggggaaggctggggggctgtctccacccagtagcgctggtgctcaaaagggtaggtgggtagcaccgcgcgcctccggcgttcgccgcggtggagcccagcccagtccacctcggctccctccacccacagtcgcccgattgccgtcagcagccgctccacctccgagctttcctcccggctggagcccagcgtggacaccacctgcacggggccggagctttggcgcgccgccagccgccccagtgtgtggcccggccccacttccaacagcagccgcggctgcacaccctcgcacaaccgctccagcccctgggcaaagcgcaccggctgcagcaggtgccggccccagtactccggtgaggtcgcctcctcggcctctatccaggtgccagtcacattggagatgaagggcaggctcggaggccgcagatgcatccggcgcagccgggcgacgaatggggccaccgccggctccatcatcggcgagtggaaggcgtgagagacagccagaggcgtgcacgcgatgccccgctgctcgagtcgtgcgcgcagctcggccaggggctcggtggggcccgccaccacacaggcctgggggctgttgtgcgcggccagggccagtgccgcgggtaggagcggttccacttcctgggctgggagccccacggcgagcatgccccccgggggcatgctgcccatgagctgtccacgtgcggccaccacctccagcgcctcttccagggagaacacgcccgcgaggcacgcggccacatattcgcccaggctgtggcccaacagcgcggtggggcgtatcccccaggcctccagcagtcgggccagcgcgtactccacggtgaagagcaccggctggcatacccgcgtctcccgcaggcgctcctgggcccattcccgctcccgcgggccagggtacagcaggcggcgcacgtccaacccgagcacgccctggagtttcccggcacagagatccacctgttcacggaagggcgcctcggactcatggagcgccgctcccatgcccacgtactgtgagccctggcccggtagaaggaaggccacggagcgggcctgggccgcactctggccacgcagcagcgcctcgggtcggcgcctctccagcagctctaccgcctgggcagggctgctgctcaccagcgctgtgcgccaggccatgtggcggcggcctacctggagcgtgtgggccacctcctccagcggctcctggggctgctggcgcaggtgctcgcgcagccgggcctcgacctcctcccgggcgcgctccgtgcgtgctgacagcggcaggagctggtagggccgcgctgcccgccgcggcgccggccggggcggcgcctcctccagcaccacatgcacgttggtgccaccaataccgaaggagctgacgcccgcgcgccgcgggccgtccaccggctcccacggctgcccccgcccgctcacgtagaaggggctgcgctcgaagtcgatgcgtgggttgggggaggtgaagtgcgggcatggcgggagctggcggcgctccagcaccagcacggccttgatcaggctggcgatgcccgctgccgcatccaggtgtccgatgttggccttgaccgagccgagagcgcagtagccgcggcgctccgtgtgcttgcggaaggcccgcgtgagggcctggacctcgatcggatctcccagggccgtggcggtgccgtgtgcctccacgtagccgatgctgtccgcggagacggccgccacctccagcgcctcggagatgaccgaggcctgcccctccacgcttggcgcggtgtagccgatcttgtgtgccccgtcgttgttcaccgccgagccgcggatgacggcgtggatggtgtctccgtccgccagcgcctcctcgagcagcttgagcagcaccacccccacgccgttgcctcggttggtgcccgccgccgccgcgtcgaaggggcggcagtacccgtccggtgaggcaatgcctccctcctggtagaggtagccctgggcctggggcacggagagagaggagccgcccgcgagcgccagggcgcactcaccattgagcaggctctggcacgcgaggtggacggccaccagcgagctggagcatgccgtctgcaccgccacgctgggcccgcgcaggcccagcttgtacgagacgcgggtgggcaggaagtccttgtcgttggcgatggcgagctggaagtctcccagcacctccctcagccgggcgttcccgtgcagggaatgcaggtagtagctgttgaggctggcgctggcgaagacccccacgcgcccccttgcgcgctcggagccatggccggcccgctccagcgcctcgtgcgcgcactccaggaagagccggtgctgtgggtcgagcacctccgcctctcgcggggagaagccaaagaacgcggcgtcgaactggtccatcctgtccagcagggcggcgcgccgcacgtaaccgggttggcgcaggagcgagggccccactccggaggccaggagctgttcgtccgtgagctgggtaaaggcgtccacgccctcgtggatgatgcgccagtagtcctccagggtgggggcctgggggaagcgccccgccatggccactaccgctacggctccctcgagctgcgtgtcgtggctcatgcgtgtctagtcctcgtcccgttgtgcctggcggcgagtgcgtctctgctccagcgccgcgccgcgcatcccccgccggcgctcggcctgcgtgggaggggaggcctgtgctggcagctgggcggctcgaggctccaggtagtccgccagcgagtgcaccgtggggtaggcgaacaggtccatgagcgtcagctccaggccgagccgcgcgcgcagtgcccgctccacgcgcaccaggaggatggagttgccgcccaggtcgaagaagctggcctcgggcgcgatgtcctggtgctcgagcacctccgcccagacggaggcgatgagctgctccagcgggcgcgaggggctcgggaccggagcgggttgcggcgccctcagctcacctgcttcgaagcgcgccctcagctccgagcggcgcagcttgcctccctccgtgcgtgggagctggtgaggctcgagcgggatgagatgatcgatccgcacccccacctgctcgagcacctgctggcggatgcgcgacaggagtgaggcagggggttgcggagcgagtccctccgtgggcacgaagaagaccgccagctcctccctgctcccctcgagcatccgcaccgccgccgccgccgccgaggagggcgccactccctccacctgctccaccgcggactcgatctcgtagcaggagaagttggtgccgtggatgatgaccagatccttggcgcggccggtaatggtcagcgctccctcggagaggaagcccagatcgcctgtctccagccagccgtcggcggtgagcagcgccgccgaggccttcgggtccccgtagtagccgggagagatcatctcgccgcgcacttgaatgcgccccacgcactcctcggagagcagctcgccgctcgcgtccaccacccgcagggcggtgccggcaatgggggctcctacatccatcagccgcagcgcggtgggcgaagcgggtgccgcgtgccgaagcggaccgctcaagctcgcgcgctccagggtgtgcatgcggggcggcgttccgggccgccgcgcataggtcacccccgaagccgtctcggtcattccccaggcagcgacgaaggcatcctcccgcactcccgagggagccaacctccgcatcagctcctccaccatgggcgcggagatctgctctccggcgctgagcagcacgcgcacgcctcccaggctccagcgccggtcctccaccttgcgcagccgctccagcaggtggctgtaggcgaagctgggcgcccacgtctgtgcaatgccataccgctcgagccactccagccatcgcaggggctcggcgagcacctcctcggtgggagcgtggaaggtgtgcatgccggcgcagagcgggcggaggtggtactcggacagggcgccaatgttgtgcagctgcaaccagacgaggccgcgctcgagcggctgggactcgtagacgacgttggtggcctccaggcgcaccagcaggttgcggtgcgtgagcatggcgcacttggccttgccggtggtgcccgaggtgaggttgagcagggccacgtcatccatgcgccctgggggcaggggcgcctcgccacccgtggctctcagctcctccacggcccccaggatgtcggcggtgggcgagacctgaagctgcctggcaagatcgggcagcatctcctgccgggtgaggacccggggcccacccagcagctgccgggcatgccgcagacgtgagagcgcgggactcgcctccgctctcgcgggcggcgccggtagcaccaggggcgccactcccgccagcacgcaggcccagagtgcctctaccgtctcttcctccctccccagcaccagcaccagactgtcgcccggccgcaatccccactgccgcaagccggcctgcaggcgccgggcccgctccaccagctctggcagagtccaggccgtgcaagagccctgtgcctggacgaagctgaccgtggccgtggggaagcgctcggcggtctgtagaagtgcctcggccagtgtccgaggggctgtgctcgggcgtgggaggggcggacactccgacagggcgagaacctgcttccgtacgggcggggccagcgtctcacccgccagctcccccagtgtccgcgtcgggtccgccgccacggcttcgagcaggctcacgtagcgccgcaccagttgcgctacgccctcctggccatacaggtccacgtcgtagatgagggtgccctcgacgccctgggcagactcccagaggtggaactccagatcgaagcgggccacgcggctgcgaagggggaactccgagagcagcaggcctggcagctcggcgcgccgcagcgggtgctgctgcatggcgaggaagatctggaagagcgggtgccgatccatgcggcgccggggctggagcacctccaccaatcgttcgaaaggcacctcctggtgctcgagggcgccgtggagctgctcggacacctgggcgagccatgaggtgaaggcggtcgaggcggagggcttcgcgcgcagcaccagggtactggcgaagcagccgatgaggccttccagctccttgcggttgcggttggcgatgggcatgcccagggccacgtcgtcctggccggcgcaccgggccagcagccattggaaggcggcgagcagcacggagaagagcgaggtgcgccgcgcttgagcaagtgagcgcagggcctgcacctggtgtggtggcagggcgaattcgaacgtggcgccctcctgcttggacagcgggggcctgggccgctctggcggcagggtgctcaggtccggcagccctgccagctgctcctgccagtactcgagcagctcgcgctcgcgcccacccttgagccggctccgctcccacgcggcgaagtccgcgtactgcagccgcagcggtggcagcgccggtggctccgcgtgtacagcagccgtgtacagcgcgcacagctcctgcacgaagacgccgagcgaccagccatccgctgcgatgtggtgcgtggcgaacaccagcacgtgttcctccggctccactcgcaccaggaggaagcggcacggcggctctcgctccagatcaaaggaggcgagcgctgcgtgctccaccgcgcggtacacctcggcctctcgctcctgggcgggcacgccgctcaggtcgcgctgctcgagcgcagccggtgcgggcgcgaggatgcgctgcaggggttgacctccggcggaggggaacaccgtgcgcagcggctcgtgacgccggacgaactcattcaggctgtgcaccaggcactccaccttcagctttcccgtgagccggagcgccgcgtgcacgttgtagaaggggctcgtaggcctgagctgttgcaggaaccacatgcgctgctgggcggacgagagcggcagcccctcgggcttgcgctccacgggcatcagcaatgcgccctcgtccaggccctgctctttcatcagggccgcgagtagctcccgctgctccggcgccaggctctccagctcctcgtgcagcttactcatgtggtctccccttgctgccgcggcgggcctcgagcagcgctcgcgcggcctcgggcgtgagcgtcttcacctgttgcaggagctgcgccagttgccgcgcctccgttcctccctcagcgggcaccgaggccgcctcctgcccccgagtggggagtactccgcccaccaggctgtgcagcagcacgtgctcctcctccaagtggaagagcccccgcgcctgggcgaagtccaggtcgccgatatggcacagccccagcccactgggagccgcgcccagatcgagaagctgggtcatcagccctgcctccagcgtggcgaagtgcagggcatgttcggcgtataccggctccacggcccccatgcgggcgatgaggaagagggagaacgcggccgagtcgaagatggcctggttctggtgcggatcatggatgcggcgatccagcccggctccggcggacaggagcaccagccgatgggtgctgggatcgtaataccaggtgccgggctcgagccctcgcgcccggccgggcttgaggtggaggtagagctgcaccgggtagagcccgcccgcggaggcgtagaggtaacgccgcgagccctgcacctcccactcgcgcaagggggccagcagccgtcccaactgctcatggctcacgggctcgagggagtaggtgcgcacactgcggcggcgctcgagagctgtcagctcctcgggggccggcgccaagccgctgcctggcagtgccacctcaggcgttccatcggggaagcggcgcaggcccgggcggttggccttgaagcgcccccactcctcggcgggcagaagcgtggagcggggcgccgtgagccgcggagcgcctccctctccctggctctttgtcttctcttggtggagcgtggcgagcccctgcacggtggggttctcgtagatgtcggccagtcgcgggcggaactgcagctctgcctccaggcggttgatgaggcggatgagcgccaccgagtccgcccccaggtccagcaggctgtcctggggctccacgcgctcgagcctcagcgcctctttcaccagggctgccagccgctccacgagcgggtcggccgccgcggcctgtgcagccagtccctgtgtctgctgcggctcggggagctgatctcgggcgatcttcccgttgcggctgcggggcagggactccaggaggacgaaggcggagggcaccatgtacgcgggtagccgctccgccaggtagcggcgcagctcgcctgccgcgggcgtctgacccgagcgaggaaccgcgtaggccaccagccgccgcactccccgaggctctcctcgtgccaccaccacgctcgccgatagcgccgggtgctgggccagcgccgcttcaatctcccccagctccacgcggaagccctgcaccttgacctgcagatcctcccggccgaggaactcgatgctcccttcgggcagcatgcgcccttggtccccggtgcggtacagccgctcgcctgtgcgcgggtgacggatgaagcgcgttgcggtgagcggctcatccctccagtactcgcgtgccagcccctcgccgccaatgtacagctcgcccggcacccaccagggccgtgcctccagccgcccgtccagcacgtggaatcgctgattggccagcggcatgccatagggaatgctcttccactgcggtgccacctggccaatggggtaggcaatggaccagatggaagcctcggtggcgcctcccaggctcaccacctgcacgtccctgccgagtgcgcggatgcgatccggtagcgccacggggatccagtcgccgctgagcatgaccaggcgcagcgccgcgggcagcttcagcccgcgctgctcggcgtactccaccagcagcagcatcagcgccggggtggagttccacaccgtgacccgcccagccaccagccgctcccaccagtgggcgggatccttctccgcctccgccgcgggcagcaccagcgctccgcccgcgccgagcagccccagcacgtcgtacaccgacaggtcgaaggtgagcgcggacaggcccagcacccgatcctccgggccgacgccaaagcgggtgttgaggtccaccacggtgttgagcgcggcccggtgttcaatggccacacccttgggtttgccggtggagccggaggtatagatgacgtaggcgaggtgctccggtgtaccgcgaggcggtagcgggggggcctcggttgcaggctcgagttcgtccacggcgatcacctgcacacccggcggccagggcacggtgtgcagcaaggaggactgggtgagcaccacgcgggcgggcccctcctccaggagctggtggagccggagcggcggctgctctggatccaacggcaggtaggccgcggccgcctgcagcacgccgagcacggcggtggcctgctcccagcccttgtgcatggcaatggccaccaactcctgaggctgcacctccagctcgcgtaggcgcgcggccagcgcctgggctcgccttgccagctcgccgtagctcagggtgcgctccggtgcgagcagcgcggggagctcggggtggagccgcgcctgggtgaagaagccctcctccagccgtccgctgggccgcggcgcctgggtggcgttgtagcgcgcgagcaactcacgctgggcaggaggcagcagctccggcagctcgccctcccacgcttgctcctcctcggcgagtgcccccagcagccgctggtaggcgtggaacatgtcgtccaccatgcccggagggaagagcgcctccaccgagtcccacgccaggacgagcgccccctcctcctcgtggactccgtggtccagccacacctggggagtctggctgatgctgtacaccagttctccctcgaagaaggagaggctgccctgggggccgcgccgcgcatccaggctgaggatgctggtgaagacgacgggcatgatggcgcccggggagcggcggccggtgcggacgagctcgcggatgagctgcacggcgctcacgctgccgtgctccaggtcccgccatagctgtgcctggagccgggaggcacgctcggcgaaggtgctcgccgcgtgtgcctctacctccagcaggaccagggaggtgaagtcgcccaccagctcgtccacctgcgggtgcaggggcaagcgctggaagagggtgaggttgagggtgaagcgcgggtgacggctccagcgggcaagcacctcggcgaaggcggccatgcaggcggccgagggggtgaggccgtgggcgcgcgcccgctcctggagccgggcccagcggtgtggctcgagccgagcctcgcggtgggtgaaccgcgcgtgctccagctgcgagggttccttcaccaggggcagctcgggcggtggcggcagcgtgtccagccgagcccaccagtatgcgcgggcgcgctcatgggcctcgccctcgcgcagccggcgctccgccagcacgtagtcgcggaaggtgatggccagcggctccagcggccggcccggctcgtggtacagctgggcgaagtcctgccgaagcaccgctgaactccacgcatccagcatcagggcatccatgctcatgtggatgcggacgcctccctcgtaccggcagagcaccagctcgaagagcggccagcggtcgctgcgcaggacctggtgggccatgcgctcacgcagctggagccggcgggactcggcctcctggggggagagcccccgcagctccaccacctccggcgtgtactccggcacctgctcgagcacctgctgccgcccatccgggagcaccaccatgcgcagcatgtcgtggcgctgcaggagctggcgccagcattggatgaagcgctccacctccagccccgggctttcgatttcgaagtagccatgggcggcgacgccgccgagctcgaaggccgagcggcgacccacccagtaggcttcctgcacatccgtgagggggaaaggctcgaagcgcgcggctggatccggcacgagcgctggcgcgggggcagtgggagccgcggcctcaccctgtcgagcccgcagagccgcggccagcgcggcgagggtggggtggctgaagagggtggccgtgggcagctccacacccaggtgcctgcggagatccgccgccacttggatgcccagcagcgagtctcctccaagctggaagaagctgtccgtgggctgcacgcgctccacacccaggtgcttgcgccacacctgctcgatgagctgctccagcgaggagggtggcaaggcctgcggctcggcggcggcggcgcgcccggtgacgaggcgctccttttcgcgcacgccctggctgccgcccaggccgcgcagcagcgagctgaagtcctggggggagatgatgagctgcggtgccccttgctccaacgcgcgcaggaaggcctccgcaccctcttcagaggagatgccgcccgccagccgcgggtcctcccaaggaggtacggccaccggtgcgggcctggagccccgagtcatggacgcgggcaatgccgtcgccccctgcatggagacggcgacgcgaccgatgtgcagcgcgcgggccatgaagctgaaggcttcggccacctgccgcgcggggaagaggcgggtgggcaatggctcgagctggccctgggtgagttgcgtggccacctcctcgagcaccgctcggaagtccgggtggtggggaccgaagtcaatggcggcgaaagtctgccctcgggccagggttcggaggcccacctgctggtccgcatacaggtccctcttccccagctccaggaagcggccgtgcggggccagcacggacaggcccgccaggagcagctctcccgccagcgagttgagcaccacatccaccccacgcccgccggtgcgctcgcgcacttcgctgacgaaggaggtgctgcgcgagtccagcacgtgagcaatgccgagcgagcgcaggtactcgcgcttctgctcactgcccgcggtggccaatatctccgccccggtccgggatgcgagctgaacggcggccagacccagccctccggccgcggcgtggatgaggatgcgctcgccgcgccgcaaccggcccacggtgtgcagggcgaagtacgccgtggcgaacggcaccatctgggccgccccctcggcgagccccagcgaggcgggcctgcgcaccacctggctctcatccaccagcacgtaggagcggaagcagcctggggccaccgccagcacctcgtcccccacgcgcagcccgctgacgccctcgcccacggcggcaatgcgtccggagcactcgcgccccagtacgctctcctccgcctccaatgccggcatcatccccagcgcgcccagcacgtccaggaagttgagcccagcggcctccacctcgatctccacctggcgcggcccgggggcggggcgggtgcagcggcgcaggccaaggctctccagcagccccggcgtccccacggcgacttccacgttgggcgccgccggctcgacactggcgtcgctgggcttcagcggccgcagcaggtacccatcgatccgcacccgctcccagccctccagatccagcagccgcacctgtagccggagttgttgcgcgccagcctgcgactcctcgggcaggctcacgtggctgagcacctgcggtggcagcggaccgtgaatgagcacgcgctcatagccaaaggcgagccagggcactccgccgggaatggcgaagctggtggccatgtccatgagcgccgggtggagctcgaagcgctcgaggtcaccgtggaagggctccggtagcgcgagctgggcgagggcctggcgagggccgcggcgaacccactggaagaggccatgccagcgtgctccggcgtggacagggccttgctcctggggctctccgggcacgggctgctcgtgttcgcaggcggcgcgcagcagctcgggctggatgcgctcggccagccgaggcacggcgcgcacccggccccgcgcatgctcattccatccccgcgcttcctccgaccggctctccacccgcagggcatgagcctgcccctcgggctggagcaccacccggacctgcctggattcgcctcgaggtaccgtcagaggctccagcagcaacagctccgccagctccaccgcctcggcccccagcgcctgggcacacgccgcccgcgccagctccaggtaggccaccccgggcagtgttggcaccccttgcagccggtgctcgtccaccacccagtcctctccacccctcagcgtgaggccgagccagtgcgtcccgcccggctcgcgctgttcgcaatcgaagagtgggtgggtgagcggcgtgggcggcttctcatggcccccccgtcgggtgcgtgccaccagccgcatggccgcccccgtatctctccacgtgccccagtccagcgccagcgctcccgtgaagccctgccggcgcaggtggtgcgcatacgcatcctggaaggcattggccgcgcagtagtccgcctggccgaatgagcccagcgccgacgccagcgaggagcacagggcgaaccaatccaacccctcgctcgccagcacctcgtgcagcaccatgctgccccgcaccttggtgcgcagggcccgcgaggactgctcgtgcgtgcggagctggatgacgccgtcgtcgaacgtggcggcggcgtgcagcacgccgtggatcttcccccagcgggcgtgcacctgctccaccaccgagcgcacggcggcctcctccgccacgtccgccgtgtacacctgcacctcggcgccgagctgctccagctccagcaggcagcggatgcggtgctgggtcctgcggcgctccgaggggtcggcctcgctccgccacgccggctccgggtgcgccggggcttcctccagccactgctcccactgctctcggggagggaagggcgagtgggtgagtagcgccagccgagcacgcgcccgctgggccagcgctcgcgccagcaccaggccgattccacccagccctcctgctaccaggtacacgcctcgctcccgaaggctgcgcaggggccgcgaggcctcgagcctctgccgggtggcgcggcgcacgtaccgctgcccgtcgcgccaggccaccgggctctctcccatgggagcggccagctcggcggccaggctcctcaccagcacttcccgtggctcgctcccgggccgcacgtcaatggtgcggcactgcacgtgagggtactccaggggaagtaccgcacaggcccccagcagcgtggccttgagcggctcgagcggctcccgcgggcccaccgcgtggacgaagctggacagcacctcgagctgtacagggcgctcaggcgcgtggcggccgagcgcacgggccagccgcagcaggctgaagaagccctgttccagcaccgcttccccgtccggggtacaggggccgggctccgcggtgagagcccaggcatggaggatgcgacgggggagccggccctgggactggagcgcctggaagagcgcgtcccagtcctcctcgctctcggggcggaggcggaaggcgtgctcactgagttgctcatagtgcccggccggctcgacgcgggtgaggagcgcgccggagtccgcgggccacagcgcggccagcacctgctcggccaggcccgaggagtccatgaaggcgagcaccgggcccgccaggggctgtccccccccgctcgtggcaggtgcctgctcccaggtgggcacgtagaaccagtcttccagggcctcgcgcgagggctgctccgggggcacaagggacgcgggcgtcggctgctgcgcgcgcggctgcggggcagcctccggttcaatccagtagcgctggcgctcgaaggggtagggtggaaggtgtgcgcggtggcgtggcgcggcgtgcagggcgctccagtccagctccaggccggcctgccacagctcacccacggcctcttcaatgcacggcacggccgtgtccggttgcacgggaaggctcgccacctcctgggtgcgggcggggcgggtggggtgccgccgcgcaagcgcggtgagcgtggtgccggggcctacctccagcagcactggctccttgaggctccagagcgtctcgagggcctcggagaaacgtaccggctcgcggagctggcgggcccagtacgtaggctccgtggcctcctcgccggtgagccaccggccggtgaggccggagacacaggggaggcgaggggcctgcaggcgcatgcgccgcagcagcgtggtgagtggcccctggcatgcctccatggaggcagagtggaaggcatgggaagtctccaggcgccggctggacacgccccggctctccagcgcggcggtgagcgcctctaccgccggtagaggacccgaggccacgcaggcccgtggcccgttcaccgcggcgatacacagctcgctgcccagcagcgccgccagctcggcctccggcagcggcacggccagcatggcccccggtgggcatccctgcatgagctgtccccgggctgccacgagctgaagtgcatcttccagggagaagacacccgcgaggcacgccgccaccagctcgcccaggctatggcctgccagcgcctgcggttggagcccccagcccagccaggtctgcgccagggcatactccagggtgaagagcgcgggctgggccacccgcgtctgcgccgccagccggcgtgcctgctcctcctgctccgcggaggggaagagcacctccctgacatccagccccagcgtctgcctcaggagccgggcacactgctccaccgcctggcggaaggtgggctcggattcatggagcgcacgggccgtgccgaccagcggagtgccctgccctggaaagagcatgacgagagggggccgctctccctcgtgagcaagcggctcgggtggccgcggctcgggagcctccaggcgctccatggcctcggccagggtgcgacaggtgagggcgcgccggtaggggaagcgggctcgccccacctggagggtaaaggccacgtccgccagttccaggtccgggtggcggcgcaggtgtgccgcgagccgtcctgcgatgtgctcgagcgcgctggtgcttcgggccgagagcagcagcacctggttgggacgggtggggccgctggcgggcggcggcggagcctcttcgaagagcgtgtgggcgttggtgccgccaatgccaaaggagctcacccccgccagccgaggcccgcgcgggctctcccacgggagcggctgggtgttgacgaagaaggggctctgctccaggtggagcgcgggattgggccgctcgaagtggagcgtgggagggatgagccggtggcgcagggcctgcaccgtcttgatcaccccggccactcctgccgccgcatccaggtgtccgatgttggatttgaccgcaccgagggtacagaaggcggtgtcagcggtatgcgcccggaaggcgcgggtgagcgccgccacttcgatcgggtctcccaggggagtgccggtgccgtgagcctccacgtaggtgatgtcgcgtgcgctgatgcccgccgcggcgtgcgccagggcgatcacctcggattggccctccacgctgggcgcggtgaagccagcccgggaggcgccgtcgttgttgagcgcccagccgcggatcaccgcgtggatgggatccctggccttcagcgcgtcctccaggcgcttgagcaccaccacgcccacgccatcccccgtgacggtgccggtagcacgcgcgtcgaaggggcggcagtgcccgtccttcgaggcgactcccccctcctcgtagaggtagccggagcgcgcgggcagccgcagcgagacgccgcccgcgagcgccatgtcacactcgaagccgcgcagcgcgctgcacgccatgttgatggagacgagcgaggtggagcacgcggtgtggatgccgagcgcggggccgcgcagattgagcttgtaggccacgcgcgtggcgagaaagtccgggtagttgccaaagaagcccgccacatccttggagccgctgagcgggtccccgtgtccgcgcagcagctggaagcggtagctggtgtccccggcgcccacgtagacgcccacccagcctgggagctgatccgggcgaaggcccgcatcctccagcgcctcccacgagcactccagcagcaggcgttgctgcggatccaggtggctcgcctcgcgcggcgagtagccgaagaagcccgcgtcgaacagctccaggtcttccagcacacccttggcgggcacgtactcggggcgccgacgtatctgctcggacacgcccgcctgtctcagctcttcctcggagaagaaggaaatggactccactccggccaccagattgcgccagaaggactccacgtccggggcccccgggaagcggccggccatgcctaccagggcgatggaagactgcagcgcttcatccccactaggtgtcattgggagctccccgcttcgaaccggcccggcggcgttgggctgcctgttgctggagcaaggcgcgctccgtggccatgcgctgcacctgcgcctcggcggctgccagctcctggggggcctgcaggtgctcggccagggcagcaatggaggagtagcggaagagggtcaccagttcgagccgccggcccagtcgggcctccagccggctgcacacctgcgccagcagcagcgagtgccctcccacgtcgaagaagttgtcctcccggctcacttcctccagtcccagcacttccttccacacctgcgccagcacccgctccagctcgttgctggggggcaccagcggggcagattccagccgacgcgagtcggggacgggcaaggccgcgcggtccaccttgccattgggagtgagcggcagggactgcagcaccacgaagcgtgagggcaccatgaagtctggtagatgggtctgcaggtgggcccgcagcgcggagcccagcctcagtgagaggctggcccgccgaggctccgaggacagacgcgcggaggctgggggcggcgtgcggttgagcggcgtggggccgagccaccgcgggtgcatccctggcgtcgccgggaggaagagcacgtcgaaggccccgtccctccgcccaggagaccagctcactgccgccgtgtagccgagcgactcggccagttgccagaaggggtctggatcctgggcccctgtgccgggttgggacaggcgccggcgcagctcctccacccgccgcgcgctgcctgtgctgcccagcgcctcggcggcccggaccgcgggcagcactcgcgcattgggaatgcctgccacccccagtggccctggcgggccctgccggagccgagcccgcagtgcatcgaggctcagtccttgcgtggaccagtccacccacggcacctcggaggccggtggcggcgtgcgcggcccgatgtggagcacggcgttgtagcggaagcgtgccatctcattcgggtgcgtgccgcgcgtcagctcgatatccacgtggctcacccgtggatgctgatgggccagcgccacgaagagtgccgggtccaccaccagctcgttgtcctccagcaccgcacgccgcacccgctcgcgccacgcctccagcggcatggagggggcggcccgctccagctccaccgaggcgtggaaggactccagcagcggcaagctccgcacatcccccacgaagacgaagcccccgtcctccacggcctccacgcagcgggccagcacctgccgcaggtactcctgcgaggggaagtactgcaccaccgaattgagcagcaccgcgtcgaaggagccggccgccacgccgctccactcgtccgccgtgcggtgtagcagctccacgcggcccgggtgctccggggggaggtagcgacgcacgtagtccaacgccgccggggagaaatccgtgcccacgtagcgctcgcagtgcggcagcagggcaaagagcatcagccccgtaccacagcccacttcgaggatccgtcgtggcctgagcccgcgcacgcgctccacccggtggcgcagccagtccctcatctcctccacggccacgggttggccggtgtagctgctcttccagccgacgatgttgaaggtcggctctccgcccacgggggcttcgcggtacatgtgcccgtcgaacacggactcccactcgtgtaccagccgctgctcctgctgcgagccctgctccgagctctccacccgcggcacggcgtagcagaccagctccttgccgccggggccctcgcgccccaccaccaccgcggactgcaccgccgggtgggtgagcaccgcggcctccacctcgcccggctcgatgcggaagccgcgtaccttgagctggtggtccacgcggcccaggaactccagcgtcccatcctccctgcgccgcaccaggtctcccgtccgatagacgcgagcccccggcgtccggctgagcggatcggggatgaagcgctcggcggtgagctccgggtgttgcaggtacccccaagccagcccggggccgcccacgagcagctcgcccggggctccgtccggcacgggctggagccgctcgtccaccacgctcacccagcccaggtcgatgggggtgccgatgggcacggagccgcccagctcctgggggctgcccacgcggtgacagcaggtgaaggtgcagctctcggtggggccgtagccgttgatgagctggcactcggggagggcctcgcgcagccggcgtacctgcggcatgggcagcacgtcccctccggcgagcagctggcgcacgccgcgcaggctcttgagctgctcctccaccatgagccggaagagcccggcggtgagccacagcacggtgacgccctgggtgctcagctcctgtcccaggctctcgagcgactgctgttccggagggaccagcacgagccttgccccgttgagcagcgccccccagacctcgaaggtggaggcatcgaactccagcggtgcgtagtgcagcatgacctcccgcggcgagagctggacgtaggagggctcatggatcagccgcagcacggcacggtggggaatgcagacgcccttgggctcgccggtggagcccgaggtgaaaagcacgtaggcgagcatgtccccgcccagcgagcgctccggcccgagcgcggggacctgctgcgcggaggccggctcctgggcggcatcgaccagggtcagtggctgccccaggcctgacagcaccgtgcgagcctgctcctcggcgatgacggtgcgcacgcccgcggcctgcaccagcaggctcagccgacgcgctggctggcgcacatccagcggtacgtaggcggctcccgccttgaggatgcctagcaggctgatgatccgctccagcgtgcgctcggtggccaaccccactctgtcgcccgcgcgcacgcccagccaggccaggtagcgggccaggcgttccgagcgctcctccagctctgcataggtgaggtgccgcccgccttgggtgacggccgtggcgcctggctgccgccgcgccacctccgagaagcgggcgccgatgcttgtttcgatcgccgcggcgggggagggcggcggaacctgtcgcagctcccgggcaggcaccaggggcagctccgccacgcggcgcgccgggagctcggccacgccctccagcagcgtgcaccaggcgcccaccagccgctccaccgtccccgcgccgtacagcgcgcggtcatacacggcgatgcagctcagcccctcttcctcctcccacaggtgcagctcgaggtcgaagcgcgtggtggccaccaggtactccaggtgctcggcctccaggcccgccagccgcaacggctcgcggggcgcgttctgcagggcgagcagcacctgcaccagcgggttctggttggcctggcgctcgggctgcaactcctcgacgagcctctcgaaaggcagctcctggtgggcgtaggcctctagcgttgtctccctcacccgcctcaacagctcgaggaaggaggggttgccttccaggcgggtgcgcagcaccagggtgttgacgaagaagccgatgaggccctccacctccccacgtgtgcggttggcgatgggcgcgccaatggcgatgtccgtctgcccggtgtagcgcgccagcagcgcattgaagccggcgagcaacaccatgaagagtgtggccccgtgctcatgcccgagccgccgcagcgcctgcacccgtacgcccgggagcgtgaagcggtacgtcgcgccgttgaagcgctgcacttccgggcgggcatggtccgcgggcaggcgcagcggggccaggcgcgcgagccgctcccgccaccaggtcagctcctcccgcagcaccggcccttgcaaccagccgcgctgccacagcgcgaagtccgcgtactgcacgggcagcggcgccaaccccggctcagcgccatggagcgccgcctcgtacaggtgcgacagctctcggctccaaacgctcagcgaccagccatcgcccacgatatggtgcagctcgaggaagagcagggactgtgcctcttccaagcgcagcagggacacgcgcagcagcggccccttgtccagctccagtggccggagcgcctgctcgcgcatccaccgcaaggcctcctcccgcgcggcgatgccatgggagcgcaggtccacctgccgcagcgggaccggagccggcgcgtggatgcgctgccgaggcacgccgtcgccgccaggctcgaaagtggtgcgcagcgcctcatgccggcgcacgagctgctccagggcgcgctccagggcgcccacgtccacccggccccgcacatgccacgcatccaggatctggtaggcggtgctttgtggcgcgagctgctggaggaaccacagccgctgctgggcgaaggagaggggcagctctggtggacgtacagcgggcacgagcggaggggggcggagctgccggtggccgagcaggacctccacctgggccgccagcgccgagagctgaggggcctcgaagagggtgcgcagcggcaactccacctgcagcgcctctcgcaagcgggagacaacccgcgtggccagcagggagtgtccgcccaggtcgaagaagtcgtcgtgcacggatacccgttgggtgccgagcacctccctccagatgtccaccagcagcgcctccacggggcctcgtggaggtaccaccggagcctgctcgcgggaggcctcctcgaagctctcgggtagcgccgagcgatccaccttgccgttgggggtgaggggcagtgcctccagcagggagaagctggcgggcagcatgtactcgggcagtcgggtgcggaggaaggtgcgcagctcctcggcacctgggcggccaccggcgcgggggacgacataggcgaccagccgccgcagggccccttcgccccgcagctccaccaccgccgcggacacctccgagtgctcgcacaggtgcgactcgatctccgccggctccacgcggaagcctcgcagcttgacctgcctgtccacgcggccagcgaacaccacggccccatccgcctgccgccgcgccagatctcccgtgcggtagagccggcctccgggctccaggccgtgcggatccggcacgaagcgctccgcggtggcctcggggtggcgccagtagcccagcgccagcccatcacctcccaggtatacctcgcccatggcgcccaccggcaccggctgcagcgcttcgtccagcacgtgcagccgcgagttggcgatgggatgacccatgggcacggtatgcgcctgctcggccaggtgttccacccgccaggcggtggagaaggtggtgttctccgtggggccgtacacgtgtagaaggtgtcctggagcgccctgtttcagcacccgcctcacactggaggcatccactgcctcgccgccaaagagcaggtagcgcagggtgctgaaggcctggggttgctcccgggccacgtggttgaagagggcggtggtgacgaagagcacggagatccgctgctcgcgcaggacctcggccagccggcgcgcctgaatggcctcctccgtggcgagccccaccagccgtgccccattgagcagcgcgccccagacctcgaaggtggccgcgtcaaaggaggcattggaagcctgggcgacccgatcctctggcccgagctgaacgtagtccgtgttgcacaccaggcgggtcatggcccggtggcacacggccacgcccttgggctggccggtggagccggacgtatagatgacatacgccagatcttctccgctgcactggggcaggggctcgccaccgtcggagggagcggggtgccatgcctggagatccagcgtggcgcagccctggggagcgaagggcagcgggccgctgtgcacgagcaaccgcgcgccgctgtcctggagcatgaactcctggcgctgtacggggtaggaaggatccagcggcacgtaggcggccccggcttggagtacggccagcatggactccacctgctccggcgagcgctccagccgaagggcgaccaggtctcctcgccgcacgcctcgggccaccagaccctgtgcgagcccgcgggcccgctccgccaactcgccgtaggtgaggctgcgctcgccatacaccactgccacggcccgcggggcctggagggcacgctgctgaaagaggccgtgaacgctggcctctcgcggataggggcgctgtgtgcggttccacccggagagcacctggtggcgctcctgctctcccagcaccggcagctccggcacgggccgatccggcgcctccaccaccgcctccagcacctggcggaagccctccaggagccgccttgccgtgggctcctcatacagatccacggcgtactccaaccgcccggtgagcccctccccggtgtcatacacccacaggtggagatccaggtccagcaccccccggggaaagtcgagcggctgcgcttgcaccccctccagcttcagcccgtggccgggcatccatggcgtgtcgctcaccgcgagcgccacgcgatagagcgagctgtccccgcgctcgctgcctggctggagcgcctccaccaggtgctcgaagggcaactcctgatgggcataggcctccacacacaccctgcgtgcctgacgcagcaactcgcggaagcgggggcggcctctcaagtcgagccgcagcaggacgatgttgaggaggaagccgaggatgccctccaagcccgggcggttgcggttggcggcggcgctgcccaccgccatatcgtgctggcccgtccaccgttgcagcagcacgcccagggcggccaggagcgtcatgtagagggtggcgccctcgccttgccccagcgcgcgcagcacctgggcttgcggagcggagagcaggggcgcccgtacctccgcgcctctcatggaggggatacgcgggcgaggatgatctcctggtacctccaggggcgtgagcccggcgagctgtcgccgccagtaagcgagctggacctggtactcctctccctccacccaccggcgctgccagtcggcaaggtccgccacctgcaggggcaggggaggtagccgcggctcggccccagcgctcagcgcgccgtagagcgccgccagctcctgttcgagcacctgcagcccgactccatccgccgcgatgtggtggaggctgagcaccagcacgtgctgctgctcggccaggcgcagcaggcgcacgcgcaggtggggctccgtctccagggcgaagcggcgccgggactcggccagggccacctctcgggcctgctccagccgctcgcccacggtggcacccggtagcgcttccacctccagcgccggctgccacggctcgccgatgagcgaataggggactccgccctcctcgcccagggtggtgcgcagcgcttcgtgtcgcctcaccagcgcagccaccgccccgagcagcgcggccacgtgcagcgggccggtgaacaccacggcccccgtgaggttgttggccggggcctcagggtggagctgctcctggaaccacagccgctgctgggcgaaggagagcgccagccgcccgtttcgagccactggggccaggaggctgcctccctgagaggagggctggagctgccgtagcagtgcgatgagctcatggcgagcgcctcccaggcgggactgcagctcgggcgtcatcacccctgggggagcctggaagcgcagtcgctcgccctctacccacaggcgtacacccaggctcgcggcgtgggcgagcaacgctccggcgctcaaagttctccctcctcgatggaggcagagggagggtggggagcctgggtgctccagctctgagcctcgagacaacccgccatggccgccagggtgggctgctcgaagagcacccgcaggggcagctccagccccagctctccgcggatgagcgacaagagccgtgtggccagaagcgagtggccccccagctggaagaagttgtcctccacccccacgcgatgcacgccgagcacgcgccgccacagctcggcaagccggcgctcggtgggggtccgcggcgcgaggtggcctggcgtttgctcggcttgtgcgggctcggggggaggcagtgccgccacctccaacttgccggtgggcttgagcggcagcgcgtccagcagcacgaaggaagagggcaccatgtactcgggcagcttgtgctcgaggtggcttcgcagcactcccacgagggtgcgccggcggctggccgccaggggctggttggcgtagctcttccagggtcgagggggaggcgggggaggcgtcagccaggccgccgggcgcgaggagccagccgcgcgggccatgagcagcgcgtcgaaacggccttcctcgtcctgggcgctccaggtgacgtggcacgtgtagtcggctgcctccgccagcctccagagctgctctggattccaggatgtcaccgccggcagtgcccgcagccggcccacgctgttgccagtccgcagcagcgccagccgtgccgcctcgtccgccgtgcgggcgttggccacattgcgcagcaccagccccgccggtcgctccgccagcatgcgctccagcctttccaggccgagcccctcatgcctccagtccagctctggcagctcttgcgcggggcctgctttcgctacgggggcgagctgcagctccacgtcgtagcggaagcggttcatctcgttcctcccgctcccgcgcttgaggtgcagccggaccgcgcccagctggggaaagtgcgtggcgagcgcggcgaagaagtccgggtccacgtacaaccgttcgtccagcagcatgcgctggcgggtgcgggcgagcagcgctggcgcctccaggtccgctgacgcctgctccagggccaccgaggcatggaacagctcgaagagccgcagattctgcacgtcgccaatgaacagggttccgcccggttggagcacgcgcagcgcgccctccacgacccgcagcaggtagtccacgctggggaagagctgcgtcaccgagttgaggatgacggtgtcgaagccggcttccggaagcccggagaagtcatccgccggctgggccatgagccgcacgcgctgcgcgagcggggagccgcccgtctggagttgctccctcagccgctcgacggctaccggggagagctccgtgccccagtaggactcgcagcggggggcgagccggcggagcaggagcccggagccacagcccagctccagcacccgccggggaacgagctccatgagccgctccactgtcgtctccacccactctcgcatctgctccggaggcagcggctcgccgcgcacgctgtcattccacccggccaggtcaaaggccgtgccgcttgggccgccataggtctcatcccacaccgcgcgccagcgctccacgtgctctgtctccgccccgtccgtgtcctcgagccgtgcggccacgtaggccaccaggcgccgctctccggcgctgtccacgtagggccgcacgtgcgcttggtgcacggcggggtgctcgcacagcaccacctcgatctccccaggctcgatgcggtagccccggatcttcacctgcgcgtccatccgttgcaggaactccagcgctccgtcctctcggaggcgcgccaggtccccggtgcggtagagccgggctccaggctcgcgggagaatggatcgggcacgaagcgatcagccgtctgctccggacgtcccaggtagccgcgcgccagggcggggccgcccaggaacacctctccggccacacccggaggcacgagctgctgctccccgtccagcaacagcacccggaggtgggccagtggccggcctacgggcggcagccgtggccaacggctcggctcgcgtgtcaggtcatggctcgtcaccacgtggcactcggaggggccgtactggttgtggagggtgcactccggcatccgcgagagcagccgctgcaactcgggggtcgcctggagttgctccccggcggtaatgagctggcgcaggtggcgaggggccgcgccgcgctcatccgccacccgcgcgagctgctgcagggcgatgaagggcaggtacagccggctcacctgctcctgctccagcacttccagcagccgggcaggatccctgcgcacctcttccgtcaccatgaccacggtgcccccagcggcccaggtggtgaagagttcctggtagcagatgtcgaagttgagcgaggcgaactggagcgtgcgtgaggggccacccagccgctcatgggtgagctgccaggccaccaggttggccagacagcgatgcaccatcgcgatgcccttgggcgtgcccgtggagccagaggtgtggatgacgtaggccaggttgtcgagcccggcctcgtgtggcgcatcctcctggggctcgcgctccagtgcctccgcctccctctccagacacaggagcgcggcgttcgtggggggcaggcgctggagcaggtgctcctgggtgaggaggatgcggcagctcgcatctcccaggaggaaggcgagccgctcgcggggctgattgacgtccagcggaaggaagccggccccggccttccatatggccagcagtgccaccggcagctccagggagcgctccacgcacagccctaccagggtgtccgggcccgcgcccaggcgccgcagccggtgggcgagcgggttggcgcggcggttgagctgctcgtaggagagcacctgcgggccgaagcacaacgcggggtgatggggggtgagccgcacctggtgctcgaagcggtggtgggccagcacctgcgcgccctccacgggcccgcccaggccgtgccccgccagcaaagcctcgtgctcaccaggcgtgaggagcgccagccgcgagagcctctcgtgaggccgctccacgagctgctccagcaggtgcaggtactgagtggcggcgcgctgcatgcgcgcctcgctgaacaggtccgcgctgtagtccagcgccccctccagcccctcaccgcgcggctccagcagcagagtgagatcatacgccaccaggccggtgaaggactcccagggccggaaggcgcagccgccagcggtaggctggggctgctccggcagcaggtcgaacagcacctggaacagcgggtggcggctggggctgcgggcaatgtctagcaggctcaccagccgctcgaaggggagcgccgcatgggcgttggcctcacgcacctcctgatcgagctgccgcagcgcctcccgcacccgggtgtgaggctccagccgcgagcgcaatgccaccggggtgccgaagtatccaatgaggccatgcagctcgggccgggggcgctgcggggcgggccaccccaccaccaattcctcctggcgagagtagcggtgtagcagcgtggtgaaggcggtgagcagcagggcaaagagtgacacgccctccttgtgcgccaggtcctccagcgcctggcgcaggcgcggctgcacggtgatggccacccgccctgcccggtacgtctgtctgaggggacgcgctccctccgtgggcagctccagcaccgtgggcaccccggcgagccgctgccgccaccaggcctccaaggcctctcccgcgggcgcgaagcttgcctcccagccagcgtagtccctgtattggacgggcagtggcgccagctccgggctcgagccttccacgtgctggccgtagagcatcgccagctctttgatgagcacctcgcagctccaggctccatccgagatcaggtgatgcagggtgaccagcagcacatgctccgtttccgccagtcgcgccagccggactcggaacagtgggccttgctgcaggttgaagggcgccgcagcctccacgcgcgccagctccgccagggcccgagccctgtccgcctgggcgaccccgctcagatcgctgagaggcagctcgggccaccactcgggccgcacacgctgctcagggcccgccgcgccaatggcaaccaccagccggagcgcctcatggcgcttgaccatgagccccaacgcccgccgcaacccctctacctgcaaaggcccctgtatgtgatgactttgcaacaaatgctgggccgcgttgcctggctcgagctgctccaggaaccacatgcgccgctgtgaggatgagaggggagccttttcgccgctggcgtgccgcaccgcgggcagcgcctcgtccgacgtggcgagtcccttggcccggagggctttcagcgcgtgctcggcagtcgctgtggctgtcaattgcacccctcctggaattgaacaagggggggggctgtgcccgatagccaatccatcgatttcataaagccccccacctctattggcatacctactgtccagcgtcataccaagtcaagccaccgtccagcttgctccttctggcatgtcgctgatagtgatgagttccacagacgcaacaggtgacccatggagggggagagcgccatggcggcccgttgccggcaggcacgcggggcatccatgacaagaattcttcttttctctggcaagggtggggtaggcaagacgacggcatccgcggccaccgcggtggccgctgccaagcgcggctaccgcaccttggtgatgtccttcgacattgcccacagcctctcggacagcttcgatctcgatcgcaagctcttcgacttcaacgagggactgccccagaaggtcgcccccaaccttgaactgcaagagatcgacatccagcacgaactccagcggcagtggagtgaagtctataactacatgtccgtgctgctgacctccaccggggtatccaacatggtggccgaggaggtcgccattctcccgggcacggaggacgtcatctcgctcatctacctgaaccagtacgtgcagcaggggcgctatgacgtgatcatcgtggactgtccgcccacgggcgagtcgctgcgcttcgtcaacatcaccagcgtgctgcagtggtatatccgccggcgcttcaatgtggatcgcacgctcgtcaagctggcccggcccctggccagtcggctcacgagctatgatctgccggaggacagctactttgcctccctcgagcagctcttcgatcgcgtcaagggcattgaagggttgctcacggatggcaatcgcaccacggtgcgattggtctccagcgcggaaaaaatggtcatccgcgagacacagcgggcctacctctacttcaacatgtatggcatgacggtggaccaggtcgtggtcaatcgtctgctgccggacacggaatactttgctcagtggcacaagtctcaatctgcctacctggatcacatccaggagtacttctcccccatgccggtggccaggctcccgctgctggagcacgaggtggtggggctggagcggttggaggatctggcgcagcggctctacggggactcggaccccaccgagcgctacatctccgggcagccctatcagttcgccaagcagcacgagggccgctatcggctgcagctcctcatgccaggtgccgaccgcggagacattgtcctggatcgccagggcaatgacctcatcatccgcgtgggcggcttccgccgccacgtcatgctgccgcgctcggtggcgcagctggatgccgtggacgcggtcctggacaaggggatgttgaagatagattttgcccggccctgaactggagccgtgaatgcagtgaggcctgtcatgcagctgaaaggggcggggtcagccatgcggatgacaaggatcctgggtgagcaggaactgcgccagatcgtccgtgcaacggggctgcacgcgctgatggatgaggtcatctccaccctcgagtacgagctggagcacttcgaccccgccaacaccgagctgcgcaagcgcgagggcttccagtatcagcacccccaccccggcgtgttggagtggatgcccgtcatgcaggtggggcgccacgccgtgatcaagctggtgggctacaacccccgcagcccggaggagctgggcttgcccaccattctttcctccctcagtctgtatgatgtgacgaccgggcacctgcgggccgtttgtgatggcacctttcctaccgcgctacgcaccggggcggcctccgccgtggcgagtcggctgctcgcgcgggaggacagccgggtattgggcctggtagggtgtggcgctcaggccgtcacccaggcacatgcgctctcgcgcgtctttcctctgggacgggtgctggtgcacgacattgctcccgaagccatgcgaagctttgcccggcgtgtggccttcctgggcctggaggtggtggcggtccccctgacgcgcgtggagcaggaggcagacatcctctgcacggccacctccgtcgccgtgggcgcggggccggtggtgtccgggcgtctgatcaaggcccacctccatatcaacgccgtgggctcagatctgcccggcaagacagagctgcccctggagatgctgcgtcgcgccctggtatgcccggactatctcccccaggccgtggtggagggggagtgccagcagctcgagcctggagagattggccccagcctctttgaactgacccgctctcccgagcagtggcgctctcaccgcgatggcctcaccgtcttcgactccaccgggttttccttggaggacaaggtggtgctggaagtcatcctggcgcacgccgagcggctgggggtaggccgcctgctccaggtggagtccatggccgaggaccccaaggatccgtatggctttctccaggagacagcgacctgcctgaaagctgccccagccgtataacgagccaaggtgttcgaatgagaatactcacggatgtatttctgcggaagtaccagcgagcccctggaccgcgcgagcgttccctggccgcggacgcgcgctccaagctgtggctgtccgttggactgaccgccttcctcgtgcctgcctatattgagtacttctgccgcatgttggggctgccgaagggcgagctgccctggaagctctatgacatgctgcgcgagcgcaatgaggcgccagacctcaagcaacgctttcagcagctcgagcacctgcccgagggttcctttggccgcgagttctggaagtactgccactcccatggcgtgccgctgccgggtcaccctcacgccctgcccgtgcactcggccgtgcatgacttcgtccacctgctctccggctatggcatctccatctgggaggaaatgctgaccacggccttcagcctgggcttcatgttcggcccccgcacccgcaactatgatccggcccagtacaagtccttggtgcccgttcgcctgctcgccgaggcgcttcccattccccagctgcggcgtgcggtggagcgaggcagcgcgatgagcgtggacctcttcggagactgggatccctggaaggtcatggagctgccgctggaagaggtcaagcggatgtacaacatccagccggagtagccgctcagcgcgtcgcctcggccagcagctcccaggtgcgcgaggcgagctgctccacctgctcgcgctgcatgtgcgcggtgttgaagagaaagctggcctccaaccgctgggcaaaggtgatcgccgtcagcaccacgtcgaactgggccgcggtcgtccccgtgaagccaaggccctcgagcgtcaggttcccatagcgggcggcaatctccacacgccccacgttgctcagggcgagcatggagtgcaggcccagccgtgtcgcgcgttccatccagggctgggaggagatgtccacggtgagcgcggatatctccaggatcaggcggaacagcctcaagtggctccgcttcttccgtgctgcctgcagaggcgatcggagtctgtgcgccagctcccagaatggggtgctgccgcgcgcgcggaagaagtccgtcttccccgtggtgaacaggccgaagtcctcacccacgccaaagcgctcccgagcatccaacgcagaggtgagggtgagcgtcacccgcttcttggcaccctgcgactcggcccgagctatcagcagcgcggccccgagcgctgcgtggacggaggacccttgctctcgacagcgcgcaagcagccgcgcgagctgctcgggctccagaattcggtggctgtagagcgcctgtccctcggcgctgctgcgagccatgccccgcggtgcgacgagccgctctgtgagcgtattgagggtcggagacaagcgcagcagcgccgaggagccccggcgcacggcggcgccaagcagtcgggtgcccggtaccatcggcccaatcagctcctcataggcgggccttggggcgagctcgggcaggtgctggtcctgggaggccatgacctgcagcagatcgcgcagggcgaagatgccggagtgcgcgtctccgatcagatgatcatagctgcacagcagctcggagcggtgctcgccccgcacgaggatgaagcggacgagcggcccagggtccgagttgaaaggcctgtcaagctctgcctcgacatgctgttgccaggactcctctgccttgcgttccaccacttccagcgcaatggggggcacaccttgcgaggtgaagcgtggcggagtacccgcgacgatcttcgctcggagcagcgggtgtcgccgttgcagggccaccaacccctggcgcacagcctgctcctccacgcgtcctcgcagcttgcccgtaatgacgatgttgaaggggcgcttctgccgtaccttatagaagacctgctctgtcgttccgagggagcgctccatatgatggatagtaccagagcctgggtgcgcgaagcgctaccatggagaagcccaagaagagcaaggagaggcatttcccaggattcctgaaatgaagcccacgggcgtcaacggatttcgaaagttgtgatcctcgcctctgtttcgttattcggttacgaaagggaggtcgttcgcttctgacgtggccctggtctgttccggccactcctgaaggctcagtccctcgccattatcgacctcatcttccgccgcgttgtggagcgcatggagcacggccgggttcacgtcgccccatgagaatcgaactcaccagggacgcctctcagcgcccctcaccggttttgaagccccgctcccccgatccgcgaggtgcccggagggattgagggtcggccggtttccctctggagcggggtgggtggagcgtccatggaggtccacccgcgtccgttcatcttgggtacagcttgggtacgagggtggggacggcaggggtcaggggccattggctgcaccggggacggtgacgtccgtgaactgggtgccggagatcccgcgcgctgtctcgggccccaaagaatgcctacaaaatcgccttggttgcagctgcgtccttgagaagccgggtccctatgccagttttgttaggcgctcgtatcaccgctcgtatcaccgcatttaaccactgccttacgattccaggtcgagcggcagattgagcctaaccgcgtcctcgacgagcgcttcgaagttagaccgcctgggctgggcctccaaccacctgtagaactcagttttcaactggggatcagtggattcggtgagcagcatctgttgttcggccggattttccacaacgtgttcgaggacagcctcgggcggcaggcccagcgccgtcttcgccacgtcttgatagctcccttgcgagcccagcttcgcattgaatgtcttgcggtcatggcgggtggtgtctctgttccatgaagcctgcttcgtggggatcttgatgtgcttcttcgcggcgacgtggacgtgccgctgctgcttctgagctgggcgctcgggatccacccgataccagatgccagaaatgtgcgagggtcgccactcaccctcattcaggagaagcgccgcatggcggagttgctcctcagggatctcgatcaagagccaaggaaagtcggcggggacatcgcggtcatcatcggcttcaaacagttcgtatagcgtcatgggtcgggttctccacgggttctaaacgaaggctacgcagcctccgcctcaccctgcaatatcgttgttgtagacgctgaatccagcgtccagccgaggtcaatgctcaccttcgcaacgagaccaaaccaacactatttagtcgtctgggcgtcggccggatcgaatgcgaccatgagcttccagtgatagttgccctcatccagcggtggcagtgggtggtattcaggccgaatttgcttccgcatccactccaactgcggagggcttgataaatattgccaaagccccgaagcagatggcggcccctcgttgcgaaggcgcaaacgtgcaatgcttgagatttcggcacccgtggcagcatcaaatacgggaacatgagggctgtcgaagtatctaaacaggcaggagtcgtctgccgtcacgatctctccagttcttcggcccgtaaagttcatgatgttggtcagtattatggcatggatgtttctgcgcgctggcggagtctcggggagtgaaactccctgtgcttggctcctgaactccttccagtcagtttcggcaatagaaacacgccgtaccaattggtgctcggcgcgctcgatctcctccctcgccccgaactcatccacaggagttgttgtcatcttcaggcacttaagctcgaagataaataggtgcccttgccaataaagcaccaagtcgtattcgatctgccgcccatctgaagcaggaaatttgatgccccgcacagcgactgcttgtgttaattcctcaagcctcgattgaatcatctgctcataatactctccccgggagtcaaacgcggagcttgagcgagctgaagctaaatgctctattgtgcgaataggatgggaattggcaatgatcgaaggaacgaacaacaccctatggtcatctactggtacgagcggctggtcccagatctctaggttttttctctgtgcgtcgaagacgatgttgttgatatgggaaaagcagaattcgaattcgatgcccgacgcctcgctgattaccttgcataggcgctgcttggtgactgcaaaaacaatgttgtgtattgctgacttggtcttgaatgttgcgtgattcctttgcagcagagccatggcgagttcatgcagcgtgaagttcaacttcaactccttctgtgacttctccagttcaggatctgctggcgctcccattactggggttaggaatcgacgcgacatgtagatcttgcgagccgtggcatatcgatcaagaccgaggagatctcgcagggctttaatatcaatcttaaggtcccatgttttccctggcttcgggagattgaagctcctcttgaggcgttccaggacttctcttctactctccagttctgccccaggaccgagtccatcagacagcattgcttgctgcaaaaataggcgctcgcgaatgtttccgatttcgctttggaggtattgcgccttgttttttggtgtccagatgaagccgcgtggatcatgctcaggtcgccagtcggtatactggatttggttccatagcaggctgaatcgatgccacgcgtgtgcgcaagcgaggagcctgccaaagtcaggatcgtcataaggggtctggggggtaaacttttcatttgggggttgggtgtcgatcctgtgcatggagatgcggagtattagttcggcggcttcggcggtagattcaaaaacaagatcgacacttgtcgttgcggtcccatcggttcctggaaccgcgattgaagggctcgccatgacaaatggcgagcccggtggggcccgcttgagcttctttcgaatcgtattgctaacaaatatgtattgggattcaacgtacgtaaataggcgccacatcattgtgaggcgcgaagatttccagaattctgatttgtcggactcttgcgatacgatctgcatggcccttgcgatgctttcgtatccgcgtagcgtgtgctgctcttctggcgcaagatcttctgccaatctgtttattgcggatactttttcgaagaatgttggattcctaggatctatggggcccagtgcgagggcgatcaaattcagccactgagatggattctccagtctgatggactggatgagtgcttgaatcttttctgagcttccttcgtttagggtggctcgcagcttcttgattattttcttcgtttgctcggctgtagacatggggcttggtttggatggtgtaaggatgtagttattggttttcaggtgtttgaacggcccatgacacgcacgggcgcggacttcatgctatgtgggtgctagcttgatagtgaggatgttctcaacattatgggaatgtcaccccggatagggtgatcgtgcgcagcccgttcgattcccacagtttgagggtgaacgtgtcctgggccgcgtccggctcagcctctgcttccaccacgaggcgccggatccgggcattggcaacgggcgcttcctgccatacagggagcatgctcagcgtttcacctgtcttgctcaccaacgatgctccctgcgcgatccagcgttgcgcggcttctgggtagtccaaatccatgagcacggacacgcggttggcggagcggtagctccatgcacgaagaatcctgatcgcgtctccaggacgctggcggacttccttctcgaagtcgaggggcttgaccgaaacgcccgacttgccgatcacgcggttcgcaaggaggccagcgaggccgcccggtcccgcatactcggcgcgcaggcgctcgttctcttcgtgacacctttgggcctccgctcgggcttctttcgattcctgttgataggactccaccgtgcgctggttgcgccacacctcgaccaagcgctccgcctgagcggggtgcgcgacgaggatgaatgccatgcctaccggcgctgctccgtccaggaaccgcaccgtcactcgcaggcgttcgccgggcaggacttgctccgacggcaccagccggagagtgcttcgtccaatgtccacgagcgagaagcggtcggcgccttcaaccgcgaccttctcctgaaggagggcggagttgaactcgaacgtggtggaaacccccgggcttatctgtacctccggtgtcgtcattgcctcgaagttctcggccgagaactcaatccggcgtacccccaagcccgtggctgctggacgcgattgcgcggcggctgccccggagaaaagcgctatcaccaggagaacaacgatgggtgacatgggcatgcgcggagaccttgaagtagcagagtggaaccctgcattgatacttggttcagccccatgttgctcctggtcggggttcactcgaagcggcggacggccttcacgtcaaaatagggatagaccgaggcgctgttggagccgtcgttgatctccttcttgaacccaatagagtcgttctcaatgatctgcatgcatacagggaagcggtcaccctttggcgtgcgtgcttcagttagtcggccgtaaacgcgatcctctccgatgatgaggcgtccggagagcgtggtccgggccggtagatttcccaatggtctccccaggtgaaccgttgtcgggcccgcgcgcaccgtgatgttcctgctaaccccctcctcggcggtcgcgaagaaggtggctaccacatcctcgtcatactcaattcgaagcctgctcatggcctcgacagcacctggcgggcacgcctctggcggaggcgtcgggcggacctgggggccagggcaggccatcgctaggcagcccgcgacaccgaggccgagcgccttgccaacggttccgccccggaagcgctgcggctcgggctcggagaatacgccggtgttcttcttcatcttcacggaagccttctcctcggagatcgtcgcggggagggcgacggccgctagggtgggcgcgctatcgagcgcggctgcggcttcctgagcttccggtgccatccatggcgccgccacttcctggccgggggcccagggcgcgaggtcgaactcgggggatgcaggtggtgagtccacggcatcactggggtgaggctccagggcgtgacgtgcggcaggagcaggggaaggcgccaaggtgcgcgcgatcaccagcgcgcccgcgctcaagaccaccagcagacccatccaggtcgccacacgcagggccttgaagtgaccggcttgtgccgggggcggcgagggcatggggccggggcgagcaggaactgggggtggcagctctgcctggatggccaccgcgtttgagtccggctcgtgtgcgccctcgccgtgtggcggacgtggcccccgacgaggccgggccttgcgcttcttcagccattgcaccagctcgtcttcgcccgcgtgcggcaccgccgcgagcgtggtggcggtgtccgggccataggcgtcgcagagtttcacgtcccaggactcgtccgcctgggccagcagggcctccagctccgcgcacagcgcgtcggcgtccgggtggcgctcctcgggctccttggccagcaggcgcatgcacacggcactcagggcctcggggacgcgtggattgagcacatggggtggtttgggggcgcggttgagcacggcctccacccctgcggcctcgtccgggaggaagggctgcctgcccgtcaggagccaatagagaacgacgcccagcgagtacaggtcatccgaggggccgggctggtaggagtggccacgctcgtccccgtgctcctgctggaagcgccaggcctcgggcgcgcggtactccggcgtgcccggtggcagcacgccgccggtgatgctgggggcgctctcgtacccgcccgcgccgaagtccaccaccactgcctctccgtcggaggtgcgctcgatgacgttgctctccttcaggtctcgatgcaccaccttcgcccggtgcgcggcgcccagcccgcgcgccacgccacgcaccttgagcacgacttctcgggccgaggggttctcctctctggcccatacgtccaaccggcgcccttccacgtagtccatgacgatgaagaaggattgaggcgcctcatccggccactgtccatgcccacggatgcgcaccagattggagtgcttgagccggaggaggatggccacttcgcgctcggcccactcagccagcccccagagtgggatgagcttgagcgcgtagagccgccctccacgccgggcgcggtacacggcaccgaagcccccggctcccagcttctcctccaccaggtacccgccgatgtccgtgcccggggggacgacgggatgcagacgcgggctcaagtgtcctctccttcggcggggcgtgtggggtcggcgttcctggacatgctctcaaccggtagcggatctcgtacgagttccccccgcgaagtggcgcgggagaagggtaaaccttgagcggatactatcgttgaacctggtgagctgtatgctcggagtgccgcccacgcggcattctcctctttctcccaggtctcctcatgtacgcgaagctctcccagcagatcggaaccaatgtccgcgccgcccggcatcgggcgggcctgtcgcaggcccaggtggccgaggccatccacgtgccgacgctggtgttcagccgcctggagcgtggccggttgctgcccagcctccccacgctggtgggcctgtgcggtgtcctccgtgtccccgtggacttcatcctgggcggcctggccctggaggttcccgcccccgatgggtccggccaataggggcgccgcgtgacggggccctgctcgtggatcgacatggccgccgagatgcggcaggaaggggcgtccccgaggcttgggccttcctgcccgcgccaaacctggttctcggtgtcctggtaccccgacgcatgaatgaagagctggcgacccgtattggaagtgccgcccgtgaggcccggacgcagctcgggctcacgcaggcggaggtggccgagaagctgggcctcgcgcacatggtctacagccgcctggagcgcgggaagatgctgcccagcgtccagacgctgctgcggatgtgctcggtgctgcgcatctcctcggacgagttgctggggatcgcggacgcggaggaggggacgaagtcgggcaagggggagcgagggcagggcggggcgcccaagctgcgccagctcaccggactggcgcgcaagatggacgaggaccagctcgatgccctcgtgaaggtggcccaggtgttgttgcgctgaaacgacgcgggcccacaccggggcccgcttgcttcaaggaatgcaccgccgcccgttctcactcttcgttcggtgcgggcgtcggctcgtcggcgtccaggccctcggggaagatgccttcttcgtccagttccacccggtcgcgcaggacggacgcctccgacagcatccgcgccagctcctcgctcgcctccttccggccgaagggctgtgactccgccgcgagcgccgctcgcagcgcatcgcgcatctcggcggccgtggcgtagcgctcggagagctttcgctggagggccttgtggacgatggccttgagcgcgtccggcaggcccgccatcgcgttctccacgtcctcggggcggtagcggttgacgagcgcgatcatctgcgtgaggggcaccgagggcgtctcctccgtcttcacgtccacggtggcgttgggggccttttcgtcctccacgtcgaagaggtgcttgcacgtcagcatctccatgaggacgaggcccagcgagaagatgtcggaccggccatccatgggcttacggttcaggtactcgggcgaggcgtacgccacgtcgcccttgagcaggaggcccggcgtctcctccctgcccaccatgagcgagtaggtagcgccgaagtccgtcaccttcacctcgccgctgcgggccacgcggatgttccggggcgccacgtcgcggtggatgatgcccagcggccggttctccgaatctctcagcgtgtgcgcgtggtggagggcgtcggccacctcggcggcgatgtagagggcgaagggcgcggagagcggcttctcgcgcatggtggcgaggctgatgatggtgtccagcgtggggccgtccacgtactcggcgatgacgtgcggccggtcggcatggattttcaggtgatggacctgggcgatggccgggtggtggaggcggaaggagagctggacctcctcgatcagccgctggcagcgctcgaaagtgacgggattgcgcaggcgcttgatggtgacgagcccggcgagtccatgggggaggtgacgctcggccaggagcaccacctcgccgttaccccgccgctccagcgtgcggagggtctcgtacgtggtggtctcgatggtgaaccggagtcgggggcgggcgcccttcaggtcggaggtgttctccggcgtcggggcctcgatctgcgtttcgtcggtcggcgtgctgtcatcggtcatgtgcggcctccaggtgggaagggacgcgcggcgggcactggctcgggccttccggctccctggtggggcctcggctgagggggacggggccggtggctctcgcggtccgaggtctactattcataaacccaaagggtattacaagcgaccacagggctcggcagggtgagcgcggcggagcgcctgcctggtgctcgcgctctgcctctgctccgtgccctgagtcccacctctaagcactggccgcaggagcttggccttcgcacgttgaaggtgctggcggaccacctgggagtgttgccgctggatctcctgacgtttcccgaggatgacgagcggcaacgcctcgtggaccgcatccgcacgatgtcctcggccgagatcaagaagctcttgaaggcgctcgcggaccaagaccagcggtagatggcgtccgacatcggccagcaggcgcgaggccatcaatcccaggagaacgccggtctcttcgggggcaccggctcggtgatttcccctacgagcacacgaccatcgtgatcaccgggggagggtccggcaacctggtcctgcggcaccacgcgcggctgtaccggctccaatgctggcgggccggtcgcggtcggcgaaggggcttcggttccgtttgccacatggcgatctccaatgccgtggccgttggggtcgctgacggttgccgcccggcaaccaccagggaccaacgcgctcctttcgagcatcgaccggagcgtcgcgttttcatcccgaagccgctgaagctctgcgtggatctccttctcttttcgctggcggtgcagccgtagggtacgcgcaggcagccctggcgcggccgtggccgtgaactgctccgaggtcagcccggacctctcccaggccgcgagcatcgcgtccaggtactccgtgctccagcgggtgcctcggctcatacacggaaggttgccgtccggtgtacgtcgcgaatcccctggccgtccacggcgcaggatcgcgcagcggcgttgatgcccgtggccctcggggcgcaccgtccgaggtgcgcagacacattcgatatattccttgtagccacaccgaacccggctccgctccagggcgccgcaacgacgtagccagaatcgatacaagttcaagagccaccctgcatttcaaggcgtcgaagcacggcttcggcgttgatgggagaggtgtacccaatgggacatgaggactcggacaaggcactgcccgactcgaaggcgaacgaggttgaatccagccgcaacgaggctgagtggaacgagcttccgatctcggcgcgagactgcgaggacctgaagaagtcctgcctcctgccctcgacggtgcggaaactcggttggcgaacggacacggacgagaacaaccggaagttgttgaactggcccgaggaatggaagggggacgctggagggctggtgctcgtgtacccggggctcaactacgccaaggtcaagccgcatcgcccgcgcgtgctccggccgaaggaggcgcagctcaccctcccaaccgcgaccttcacggaccacatcctgcgcccgtacacccaggatgaggtcgaaggggagccagcgaaggtgaagaagtacgaggctcctttcgggtacgcgccccagatcttcgacaccgcgatcctctgcccgatgcttcaagacgaagaagtccccatggcgctcattgagggcgagaagaaggcggcgctgctcgcgcaggaaggcaccccggcgctggggctccccggcatcagcatggcccatgatgttgaggcccggcgacgaagctgggatgacctgacggacgagtgggtaccgcaccccgaggccgcatcataccttgcacagggccgcacggtgttcgtctgcggcgatgcgccggacatggacggcacgaacatgaacgtcgttcgtgaagttgtgcggatcgcgaagggcctttctgcgcgcggatgtgaccctcagattccgtacgtggaccacgacccacagcacgagaaatccggtgtggatgattgggtgcatcgcgagatgaagaagttgcttgccgctcatcaccacaagacggaagcatgggctcgtcagttcctgatcgtgcagtacttggcctctgcgcgcccggcgcttccttcggcactctgtgactggctcgtggaacagcatgaggcgcacggtggggtgaaggagatcgagatcaagcgcgctctcgtctggtgctcggtttggttctccaccgagcatggcatcttcaagaagtgggtcgggaccttgaagaggaagaaggtctgcaagcccgaggtcatcgaccgattggtgcaggcgttgccgagggtcgagaaccgcttcgagccgcgcacatgggttcaacactggatggagaagaacggcgtcacattcgtgtacgcgagcgatggcttccagattgggggccggatgtttcctgcgtccgagttcttgtcccagatcgagatcgagtccacgaacgagcgcacatgcatcagcgtgcgaaatctcggtaacgccgtgcgcctgtgggaggcggaccaacgccgggggatcgtcgagcagtatcgtgagaagttgaagttccgcgaggacggacgccgaggtgacgccgaggagttcattcgagcaaccacgggacgccttgacccggtagatctcgtggtcgttcttcacttcatttggcaggtgaagcggaagttgttcgggaagccggtcaaggaccacctgatgccgatcttcgtcggcaaacagcggggcgggaagactacggccatcaagagcctgctacagcctcttggcgatctcgttgggttccccgccgatctccagttcctgaccgatgagcgccagcagttccggttgactcgctgctacggcatgttcttcgacgaaatggcgaaggcagagcgggtagcgtctgacgtgctcaagaaccgcatcaccgccgagcggatcgagtaccgggtgctcggtgtccagaagctccagaccggcaccaacaacgccaccttcatcggtgcgtccaacaagcaggtgaaggagatcgtcgtcgatcccacgggaatgcgacgcttctatcaactggactgtctgccccagatgaactggacggcactggagcagatcgacttcctggccatgtggacgagcgtggacgagaaggcggagagcccgctcctcggccaattggcgcaggtccaggcccgccaggatgagattcgagccaaggactcggtggaagatttcttcgagcgccggtgcgcgcagcgggaccagtggatcaaggccacggcgctgtacggccactacgtcgaggacttgaagtaccagggccgtgaccggatggcgttctcgctcacgaagttcggtgaacgcatgaaggagttggccggtgaagagaacacgggctggaagcggagcgatggaatcaagtaccgggtcacggtgaaacgctgggagaccgagatcgacggggtgatggagagcatcgccgctggcgctcggatggaccttgcgcacccgtgattggaacggatgcgttccgactgcggcgatgccttccatgctgtctgcttcggtctccccctggttgcagagagaggtggaaggatcggaagggatggaaggctatggggaagtcaggacgatgacgccgcagcacgagtaaagggctgaagtagccggtgctgtgacccttccgggccatccatggcgtccaacggggctcaggtgccgggccaagcgcctcccgttcgccttcaccggcacggaggcgggcagggcgagcgcccggaaggacctcggagagattcgatacattcagaatagggacggactggtggccaccggctcgatccacaccttcgacaccatccacggcctccgacggagaccggttgagtacaagtccatgatcgagaacttcagctatatccgtacaggctccttgcttgctcggccggagccaccgttggacctcattcctattcccattccagtctttcgacctgccgtgcccattgaggaccacgagcccgcacccgtggaatgcgccatcctccaggaactggccgagatcaagcgcgaggttcgtgcgcttcgcgctcaatcggtcacacagaacgcctcggctgtgatgctggagcgcgcgtcggcaatgctcggctgcaagcggtcacaggtcttcaagctcctggagcaaggccggttggagcgggcaccgaagatcggacggtccgtgatgatcacggtggcgagcatcgaggcactgctcgcggagggcgcccctcggaagggaggcaatcggcctcaacaaaccaagcagcctgaacgagtccgcaccaaggagcggcgtgggaagcaggagggaaccgcagccggagcgtatccgaacccaggtgttgccatccgcaagctcacgatttgagcctcgttgaaagtcgccgtaacgaagcggccgaagctcacgagcgagggttttggtgcccctcgacatggcccaacgggatagaggaggcagaacttcttgtcctggcatccgcagccggatcgacacgctctaaccccccgacatcgtgacaagaatgatccggcagtgatcgaggcgtagttcgccgcatcctactcctcgatcaaggaagagactttgctggccgcgcccgaggggccgatggtctacttggcgcgcaggtgcagcgtgtctcctgaccactccaggcgcgtgcggtactgcgcctccaactccgtgttgagcaccttcgtcaactcttccaagtgctccctatcgcaggtccggttcgggtacaggtccgccgcaacgatgttgatggcgtcgatcggaatggacgcgggaatagtcccgacggggtgagtgggcgtggaagggagcagcgagcgcagcacgcctccgaactccgcaaccgtgatgggggctctggtcggcttggctccggcaattgcggcgcgagtctccgggaaggccgcctcgacgaacgcgatcgcgaccctccgtcgcgtttctagatcccacaccccaaagttgaagggcgcctgcatgagggcgcggccatggagatcggttacgactcctgcactgccgttgagcatcgaggacacgcgcaggtggaggtacccgacaacgttgcccgccacgtcggtgatggtgcacttccccccgaaactaggaggttcggttacggccaggatctgcatcgaatggctcctttgtgggaggcgtgcggtaatcacctggagcgttcggcgcaataagaacgttgaaggctccggcctggggcctgacgcatcaacgaacctcctcgtactgatctccgaactctctggttcatgagcctcaccccgcaggtgcccgagctatgcgcaactccgatggatcattcgaatgctccaggcggatggggacgacgtacatcggcggcactgtggcgctgacgtagtggagggccgtggtccgcgtactgctgtggttgagcgcctgagcgacggcttccagggacaggccaccgcccttcgggttgtagatgctgccctgctcgaccagccacgttgcgaagctgtgccggatcgcgccgaagtggacgaactccaggctcgtgcgcgcgcacacgcgctccacggcctcgcggatggtctgccgatccggcgctgaaccccgggcttgaaggcgctgggcggcggcgagcccctgcacatcgagcgacaaggtgaacggcttcccggtcttgtgcttgaacgtgacggtggcggcgatctcgccctggtccttcagcaccgcgatcttgccgtcaccgctcgcgagccggtccacctcggtgccgtgcatcccggtcttggcctgaaggcacagcacatcgcggatggcctgcgagccgagggccgcgtagagctgctggacgtgctcgatgctgtagcccttgagttcgtggttccggcgggcaggggggaccttcaggaagcgtccggggttcaccatcgggtccagttcgcccgagtcctgaaggaacgaggtgaaggacttgaagacgatgatcctccacttcttgccggtgtcccaggtggccaggatcttcttcaacgccggtccggtcaccgcgcgcaggtccttgtccgcgagcgccgttgcccacgcggccaggtagctgcgcgtgctcttcaggtactcgtcggacctgccgctggacttcagatgctggaggaaccgccgggcacgatcctcgtccaggaacaccgcctgcgcggcgtcctcctgggcctgttgggcctcgtcttggcgctcctggctcgcggtccggtacgcggccgggttgcggcggaaggccgccagctcagccagggcctcggcctcgctccgcacgtccagcgtgacgttgtacgcgaccccggcgacggtcttgcggatgatccagcgcgtgcttccgtcggtggccgtgtacgtgcggcctccgatccacttcccgctccacttcgtcatgcgcggctcccgtacccccctcacttgggtaaaacttgggtacgagaggtacaggcgggtggggcgtcctgcaacccgatcagggccgcgtcagaaaaccccaaggaaaacatggcggtagagcatgagaatcgaactcaccagggacgcctctcagcgcccctcaccggttttgaagaccgggccggccaccaggtccggaggccctaccaccgtcgattactgccgcaccccacgggccccgtcaaccaacgcccggctcaccgtgtcttccgcgccgccttcacgggcttcaaccccggcaatccgttcaccatcgtggacaccaacagccgcgccagctcctccggcggcgagcccttgaagcccgtacacgtcagccgcagcgccacgatgccgtgcaccccggcccacagcacctcggccagcttcgagggctcggcgtcctcggcaatcctccccgccgccttcaggtcctcgaacaccttcaccagcaccccgaaggaccgcggccccgcgccgtcctccggcgcgtccctgaacagcgccgtcgacagcttcgggtcctccatgaagatgagccggtacgtctccggctgctccagcccgaacttcacgtaggcctcgcccagccggtacagccgctccaccggctcctccacggatgccgccggctcgaacgcctccagcaggtcctggaacccccggatgcacagctcccgggcaatcgcgtcccggttctcgaagtgcaggtagagcgtcgccggcgcgtactccaccgcgtccgccagcttgcgcatcgagagggcaccaaagccctctcgcgtcaccatgtccttcgccacctggaggatctgctcgcgcagctccgcccgctggcgctccttccgctccgaaatccccatatccccactgtagggcttgacgtcctgaacggccagcagtagatgaacaccgttcacaatgaacgacgttcataaaacgctcgccgttcggaacccagggagcggaccatggatacggacaaggtggcgttgtttggagcgtcgggccccatcggacacagcatcgtgaaggctcttcgcgagcaggggagggcgtaccgggtggttggccgctcgcgcgcctcgcttcagtcgcagttcggcgcggacccgaaggcggagatcgccacctggaaccccgacgcgccggacaccatccgcgccgccgcccggggcatccgcacgctcatctacatggtcggcgtggactactggcgcttccagctccacccggagctcatgcgccgcaccgtggacgccgccatcgccgagggcgtcgagcgcgtggtgctcatcggcaccgtgtacccgtacggccgcccccgcaccacgcccgtcaccgaggaccacccccgcgagccgcacaccttcaagggccgcatgcgcaaggagcaggaggacatcctcctcgccgcggacgccgccggaaagctccgcgccaccatcctccgcctcccggacttctacggccccggcatcgacaagagcttcctccactccgccttcgtcgccgccgcccagggcaagcgcgcccagctcatcggccccatcgacccgccgcacgagtacgtctacgtgcccgacgtgggtcccaccgtgacggccctcatggacgcccccggtgcctacggccgctggtggaacctcgccggcgccggcgtcacctcacagcgcaagctcgtcgaggagatctacgcccaggccggccacctcgcgaagttcatgacggcggggaaggggatgctccgcctcatcggcctcttcaacccgttcatgcgcgagatggtcgagatgcactacctgctcaccgagcccgtcctcatggacgactcggcgctgcacaagctgctgggcagcgtgcgcaagacgccctacagcgagggcatccgccagacgctggaagccacgcgggcctcgctcgtcagtccagcccccgctgccacaggtcgtcctcatccagccccatgaggtgaccgacctcgtgcatcacggtgattccaatctgctcgatgagttcctcgcgcgtcctcgcgaagcgctccaggttgcgctggtagagcacgatggacgcggggagctcatacgcgttcatcacgctccgctcgcccacgggcgtgccgcggaacaccccgaggatgctcggggacagcggcgggtcctgccccagcaaatcctcgtccgagggcaggtcctccacggcgatggtgacgttgtccaggtactgcttcgcgtggcggggcagggacttcaccgcgtcctccaccgcgcggtcgaactccgcctcggccagctccaccggcggggggaactcctcgggcaccagcgcccgcgccttgtcgaagcgccgcttcgcctccttctcgtccccgcgccgctcggcgatgagccccaggtagtggtgcgcccacgggtcgtccggcgcgtccttcagcaccttctcgaaagcggccttcgcctcgtcgaagcggcacagctcgaacagcgcgatgccccgctcgacctgcgcgtccagcgagcgcggcatgtggccgagcgccgcgtccaggctcaccagcgccgtggcgcactcgcccatctggttgagccccatgccctccaggaggaggaactcgtacagcatctccacgtcgtcggccttctgggccaggcgccggcctcgcgcgcacagggcgagcccctccgccaccgcctcccggtcctccccggcgcggcacaccaggcagtccgcggcgctcagcaggatttccaggtcctccggcgccaccttcagggcctgcccgaaggccttcccggcctcctccagccgccccaattccaccagggccgaagcccggaagtggagggcctcgggaagctcgggcgcgtccgccagcaggccctccgccccggccagcgcggcctcgaagtccccggcctcgaaagcgtccgccaccgcatccagccgagcctccacgccacccaccccctctcgcttcgcggtccgcttccccatgggccggcacatatgaaggcacgctgtgcgttgtcaacgacgggcacggctgttaggttccggcgcccgtccatgtgtgacggcccgccccgtgaacatccttgtcgtcgatgacgatctcgagctgtgcaccatgctctctcgcttcctggagatgcatggctacacggtctactcggcggcggatgccctgcaggcgctcgacatcctggagcgcaaccaggtgggcatggtcatcaccgattacctcatgccccacctggacggcatccacttcacggagatgctcaaggccgacccccgcttccaggccattcccgtgctgctgatgacgggcgcccaggacgagggcgtcaccgaccggggcctgcgcaagggcgtggcgctgacgctgcgcaaacccctggacatgggtcagctgctcaacctcgtgcgcttcgccgagtagccccccggccagacggccccgaggggccctggccccgtccgctcgcccacaggcacgcccttcctggttgacatcatttcgctggcccttatgttggcgctcgccatggccgagtgctaacggccagcgtcgtcacagttaaatcccccagtaatttcaggaggttgcgatggcagcgaaggagattttcttccaccagtccgcgcgtgaggccatccttcgcggtgtccggaccctcgcggatgccgtggcggtgaccctgggccccaagggccgcaacgtggtcatcgagaagagctttggttcgcccacgatcaccaaggacggcgtcaccgtcgccaaggagatcgacctcgacaacaagttcgagaacatgggcgcgcagatggtgaaggaggtcgcgtcgaagacctccgacaaggccggcgacggcaccacgaccgccacggtgctggcgcgtgccatctacgaggagggcctcaagctggtggccgccggccacagccccatggacctcaagcgcggcatcgacaaggccgtcgaggtcgtcgtggaggagctgaagaagctgtccaagcccacggcggacaagaaggccatcacccaggtgggcaccatctccgccaacggtgatgagaccatcggctccatcatcgcggacgcgatggagaaggtgggcaaggagggcgtcatcaccgtcgaggaggccaagggcctggagaccaacctcgacgtggtggagggcatgcagttcgaccgcggctacgtctctccgtacttcgtgacgaaccgcgagcgcatggaggtcgtcatggacgaccccttcatcctcatcagcgagaagaaggtctcgtcgatgcaggacatgattcccatcctggagcaggtggcgcgctccgggaagccgctgctcatcatcgccgacgacatcgagggcgaggcgctggccaccctggtggtcaacaagatccgcggcgtgctgaacgtggccgcggtgaaggcgccgggcttcggtgaccgccgcaaggagatgctgaaggacatcgccaccctgacgggcggcatggtcgtcagcgaggagctgggccacaagtacgagaacctgacgctcaacgacctgggccgctccaagcgcatcacggtggacaaggacaacaccaccatcgtcgacggcgccggcaccaagagcgagatcgagggccgcatcaagctcatccgctcgcagatcgacaccgtcaccagcgactacgaccgcgagaagctccaggagcggctggccaagctggtgggcggcgtggccgtcatcaacgtgggcgccgcgaccgagaccgagatgaaggagaagaaggcccgcgtggaggacgcgctgcatgcgactcgcgcggccgtcgaggagggcatcgtccctggcggcggcgtggccttcctgcgctgcctgcccgcgctggagaagctgaagctgggcggtgagcaggacttcggcgtggagatcatccgccgcgcgctccaggagccgctgcggaagatcgcctccaacgccggcgtcgagggcgcggtggtcatcaacaaggtccgcgagggccagggcgcgttcggctacaacgcccgcaccgaggtctacgaggacctggagaaggccggcgtcatcgacccgacgaaggtcgagcgcaccgcgctgcagaacgccgcgtccgtggcctcgctgctgctgaccaccgaggcgatgatcgccgaccgccccgccaagaagaagggcaagaacggcggcggcgccgggatgccggactacggcggcgacgacatggactactgagccgctcacggcggtccggggccgatgaggcctcgggcccgccgagccggtgaggtgttccactgatgcaggacgcggccccggatgcctcctcgcgaggcgccggggccgtggtcttttcgggggtggaggagggcgtcagggcacgcggcccacggcgccgccggtgccgctctcctgcgacgtgtagaggagggtgctgccgtccacgatgagcccgcctggtcccgtgcccgggggccccaccggatccgacgtccccagcgcgcacgtgcgcacgcggcgcaggaagtccgcgccgtcggcacgtgactccttgaagtagatggtcccattcagttccaccgggaaccacgggccctggagaccgtcggccagcacctcggcggtgcctccagcgcggggcagccgcaacacccggccggtacccccaccgccctcggtgacgaggaagtgcgtgggggtcacctccagtgaattgccttggaggatggtggcgtcccgccgctccgcgggcgcgctgccgtccagcgggacgcggtacagacccgagctgtttccggctcccgtccccgcgctgacgaggaaccacacgtccgagtccaccactcgcgcgccacgcaccagggagccgccgggaccggtgtagagaacctgggagttgccgccatcggtgtccacccggaccagcgactgccgccccgtagcgaccaccagcacgtcgcgtccggcgagcgtggcgcggagcacctcggtaccaccgacggtgacgttgcgatccgtcgcgtcgatgggcaggtcgccccgcttcccggttgccttgtccacccgccagagcccgtccaggtcgagcacgtagacgctcgtcccatccacggcgatggcgtctggtgcgcggaagcccgtggccagaaccgtgggtggacctcccgcgcggggcagcctcagaacctgtcccggtcccggactcggctgctgggggttcagggagtgtgactcggagatgtagatgtccgtcgtgtccaccgcgagccggcggggcgtgttcagtcgcgtggccagctccgtatcgggctcggccgcgggcgcctcacagcttccgccatccaccgtgcccgcgtcgcccgctcccgcatccgtgcccgcatcggagccggagccaccatccggctccgtgcctccgtcctccgtcgggcccgcgtcctctccgcccgtcccggagtcctccgtcgcgcccccgtccggccgctccgtcggcgggggcttgtccgaggaacaggccaccgcgaagagcaggacggacaggagcgcgagtctcatgggacctctctcttgaaggcgcggctcagctcacggctgagcgccgtggtatcggacagcagcttcggaaggcacgcggcggcaccggcgcgcagcgactccagcgccgtctccatggtgaggtgctcggccagcacgacgaagggggcgccctgggccagcgccttggccagctccagcgccttgcgcccataggccggcgcgaagtcccagctcaccaccacgcccaccggcgtcgccatcgccatcagctccgtcgagggcagcacccgcgcctccagccccagcatgtccagggcctcggagatgagccgcgccgtcgtcgggttgtcctccagcacgtccacccgccgcacttcggccccgggggccaccaccggaggcaccggcggctccgaggacagcgtcgtgcgcaacagcccgcgcacctgccggatgtcgtcgaagggcttgagcaggtagtccaccacgcccagctccagcgcctgctgcgtcgtcaccagcgacgggtagcccgtcatcaggatgacgcgcgagttggagtagagccgccgcgcctgctgcgccagctccagcccggacaggcccggcaggttcttgtccgtgacgatgaggtccactggcgcctggcgcagcaaatccagcgcttcctcgccgctggccgcctcgatgacctcgcactccttgcccatcaggtcgcggaagaccatgcggatgatggtctcgtcgtccaccaccagcagccgcttgcgcagctgcggcggcgcgtccgtggcggggaagagtacccggaacacggtggccggcgggggcacgtcgcgaatggcgcccggcgccgcgaggccaatcgtcgcgttgtgctcctgggcgatgcgcttgcacaccgccagccccagtcccgtgccgcgcttgttggcggtgacgtagggctcgaagatgcgctcgcgcagctccacggggatgcccgggccccagtccgccacgtacagcaccggagaggcgccctcgcgcgagagcaccaccttcacgcgcccgcggccggccatggcgtcgcgcgcgttgttcagcaggttcagcgtgagctgctcgatgagccgcgcgttgccctggatggtgatgtcctcgggcgcctccacctccagagacatgcgcgccgagtccgggttgacgctgaacagcttcgccgccgcccagatgggcgccgccagcgacaggcgctgctgcggcgcgtgccgctcgctggcgaggcggatgtagtcggagacgatctgttccatccgctccacctgcgccagcagcagccgcagcgggccggtggggccaccgtcctccgcgagcagctgcgcgtaggccttcacgcccagcaggggctgccgcagctcgtgcagcacctccgccgccagctgtgccgagtgcgcgcccgcacgttgcagagccgccgccgccgcgcgcgcggccggcagatctcccgcctccagggcctggagcaactgggagagcggcgcgggtgtttccatggcccgagcatggcggaggcagcggtatctacgcaacgcgggcggagggattccgttgacccgggcccctggccgcgcggatgctcctcgcgtcccctggcgccccgtccagaacgtggacgccaccaccggcctcgggagggccttcatgccgcagaccaacccgttccactcgctggtgccccggaagatgaccgactccgagctggcccgctccatccggctgaacatcgaggcggagctggacgccatcaacctctacgccgcccacatcgatgccaccgacaacgaggaggccaaggccatcctccgtcacgtcatggacgaggagcgcgagcacgccgccctcttctggcagctgattgcccggttggaccccgagcaggcccagcatgaccgcgaggcctcggagaagtaccggctcatcaccaccggtgccccgcacgaggaggtggaggcggtgggcaaggagggcgggggagcacgcgccgaggtggagaccaccccgaccaagcgcctcaccgtgggcaacctgcgccgctgagccgctacgtgctggagccgccggggccgctgccgccctggcgccgctccgccggcagcggctccagatccagggccgccatgtagacgacattccgggagccacgcttgccccggtacatggcccggtccgccaggtccagcagcgtggccttgtcccgggcgtgctcggggaagctggccacgccgatgcacgtgctgagcttcagcgacagcccctcgcgcgcgaggaacaggtgcgtctccatggtgcggcggatgcgctccgccaccttgagcgcgccgccggagtcggtgttgcgcaggagcaccacgtactcgtcgccgccgtagcgggccaccacgtcgtggtctctcacgcagcccttcaccacccgggccgtctccaccaacagccgcgagcccacgaggtggccgtgcgtgtcgttgatggacttgaagtggtccaggtccaggaacagcaggctgaaggggcgctgcgtctggacggagtcctggacctcgcggtccagcaccaggtgcaggtagcgcgtgttgaagaggcgggtgaggtcgtcgacgtacgccaggtcctccaccgccgcgaagcgcccgaggttgcgcagcgccagtgcccagttgcgcaccaggtagcccgccgtctcgccggtccactccggctcggcgccgtcgaagaagagcaccgcgtggcccagcaccgtggtgccctccacggcggggatggagaggacgcgcgggaaggcggcgtccagcccttccagctcccggggcgcgcgcgcgttcgagaggcgctcgacgagggtggccaccagctccggctcgtgccgcggaggcagtccgcggacgccctggagccgcaggcccttgtcgccgtcgcgctccagcagcaccacggcgctggcgcaggccatggactccagcgcgctcgtggtggcggaggccagcttctcgcgctccagcgtggtggcgatgcgctggccggcctccagcatggcgacgtgccggcgcagcgaggcgttctcctggaggaggtctcgcgtggtgagggcacggcggacggcatgctggagggcctcgggggccaccggcttgacgaggtactcggccgcgccgctcttgatggcgcgcacggcggggtccaccttctccaggccggtgatgaccaccacctccacgccggggtggcgctcgcgcacgtggcgcagcacctccatgccgtcgccgccggggaggatgaggtccgtcaccaccgcgtcgaagcggtccccggccagcgcctcccgcgcgtcctggagcgagcccaccgccgtgacggcgtgccccacggccgtgaggtagtcgccgtagagggtgcgggcgatcttttcgtcgtcgacgaggaggatgcgcgccatctggctcgatggcttaccaccaaggcgaggaaggctgctagggtagggccgtgtcacccttcgaaagcggacgccggctctgccttctcgtggaggcaggagagacgcgctacgcggtggaggccacctccgtcatggaagtggccatgcccggcgccaacggctccagcctgcgtggcgtgctggaggtgaaggacctgtcggccctgctcggcggcttgcccgaggaggggccgggcatggtggtggtgctcgacgtgagtcccaccctggccgtgcgggtgcgctccgtggtggaggtcgccgacgtggcgcgggcgccgttcttcctcctgccccccgggctggcggactcgctggcccccctgagccggggcgcggtgctgcacaaggagcggctctacctggagctcatcgccgaggcgctgccccaccgggtgggccctcgtgccgcgcccgcggccctgcgccccgtccactgggccgagtccacgcccgacaaggcgctcgtcttcgaatcgcaggggcgcctgttcggcgtcccgctgggcttcgtctcccaggtgatatcgcgaggggaggccttcagcgtcctgcccgtgcagagcgggccggtggccggcatcttcccgcacgcccaggtgctgtggcccatctgctcggtccccgcgctgctgggctcccccccggtacccgaggccctcttcatcctcacggagctggccggccggaacgtggggctgacggccacccgggtgctcggcgtgctgcagcacttcgagccggagaccaccattggagccttccgtgcccccgggttgacaggctccgtgctgttcctggacctgcagcgcatgttttcttgatcgtgctggagcgcgaaacgtaagctgccccgcttgatacagggccgcgacctgggtttttcgcggcaggaatctccaacgaattcaggggggtgggacgccccccgaggcccgaaccgatgcccaagaatctgctggtcgccgatgactcgctcaccatccgcaaggtgattgggatgatcttcgcgaccgaggactttcaggtgaccgcggtggacaacgggctggacgccatctcccgtacccgcgagctgcgcccggacgtcgtcctcgccgatgtgatgatgccgggcaagagcggctacgaggtctgcgaggccctgaagagcgacccggccacccagggcatccccgtggtgctgctggcggggaccttcgaggccttcgacgagaaccgcgcccgcgccgcccgcgccgatgaccacatcgccaagcccttcgagagccaggtgctgctcgacaaggtgaaggcgctggtggggcagaagtccaacaccatgccggcctccgcggccacgcaggtgcgcccgcccaccgcccagccggccactcccgcgccggtgcctccgggcccgcagccgggcgcgcccacggccgcccgtccgggcattccgcagggcacccagccgggcgtgccgcgtcctccgggcccgggcatgccgccgggtgctccgggcgcgccgcgtcctccggggcctggaatgccgccggggccgggcatggcccgtcctcccgggcctggaatgccgcctccgggtgctccgggcgcgccgcgtcctccggggcctggaatgccgccgggaccgggcatggcccgcccgccggggcctggaatgccgccgccgggtgctccgggcgcgccgcgtcctccgggcccgggcatgccgcctccgggcgccgccgcgcgtcccgggcgtgccgcctccgccgggtgcgtccgcgccgggcatgccgccgcgtccgggcgtgcccgcgcctccgggtgggccggcgccggcatggcccgtccggggattccccagggcagccagccgggcttcccgcgtcctccgggcggcgccgcgccgctgcctcccgcgccgggtggcgcgacccagccggcggcccgcgcgagggacccgttcggcctgggcgctcccacggcggcgccgcaggcagcccagccttccatcagcatcgaggactcgctgcccgagcccagcggtgccgaggagatctccctggacatgggcggccccccgacggccgctccgaccgcggtggcgccgaccgccgctccggccacggcccgtccgaccgccgcggatggtggcgaggcgctgctgcgcgaggcgctctcgaaggcctcccgcgaggtcatcgagaagattgcctgggaggtggtaccgcagctggcggagaccatcatccgtgaggagctcgagcggctcatcaaggaccgggagacgcagcactgacgcgttcctcgccttaacctctctccaagaccttcccgccggccccggttcccccggggctggccgtccgcaatgaccgacaccactgaactgtccaaggcctacgagcccaccgaggtcgaggcccgctggtacgcctgctggatggagcggaactacttccgcgccgaggcgacctccgacaagcccgccttctccatcgtgctgccgccgcccaacgtgacgggcagcctccacatcggccacgcgctcaccgccaccatccaggacatcctcgcgcgctggaagcggatgagcggcttcaacaccctgtggctccccggcacggaccacgccggcatcgccacgcagatggtggtggagaaggagctgaagaagaccgagggcaagagccggcacgacctcggccgcgccgccttcctggagcgcgtctgggagtggaagggcaagtacggcgcccgcatcggcgagcagcaccgcttcctgggcgcctcgctggactggagccgcgagcgcttcaccatggacgagcagtcctccgccgccgtgcgcgaggtcttcgtgcgcctgtacgaagagggcctgatgtaccgggcccagaagctcatcaactggtgcccctcgtgccgcaccgccctcagcgacttggaggtggagcacgaggagtcgaagaagggctccatctggcacatccgctaccccgtcaaggacagcgaccgcacgctcaccgtggccaccacacgcccggagacgatgctgggcgacaccgcggtggccatccacccggaggacgagcgctacctggggctggccggcaagagcgtgaagctgccgctgaccgaccgcgagattcccatcatcgcggacgcggagctggtggacccgaagttcggcaccggcgtggtgaaggtgacgccggcgcacgacttcaacgactaccagacgggcctgcggcacaagctgcccatgctcaccatcctggacgaagcggcccggatgacgaaggagaccggcaagtacgccggcatggatcgcttcgaggcgcgcaagcaggtgctggcggacctcacggagcaggggctgctggagaaggaagagccccacatgctgaacgtgggcacctgccagcgctgcgccacggtggtggagccacgcctgtctccgcagtggttcatcaagattgaaccgctggcgaagccggccatcgaggcggtggagcagggccgcacgaagttcgtccccgagtcctggacgaacacgttcttccactggatgcgcaacatccacgactggtgcgtcagccgccagctgtggtggggccaccagattcccgcgtactactgcacctcgtgcagcccgcggcagggcgacgacacggacctgccgctggacgcccccacggtgaaggtgggcggggtggacttcgcgcgcgcggagcccatcgtcgcgcgcgagcagccgaagtcctgcccgaagtgcggcggcgcgtccttcatccaggacccggacgtgctggacacctggttctcgtccggcctgtggccgttctccacgctgggctggccgcgtgagacgccggagctgaagaccttctacccgacgtccgtcatggagacgggccacgacatcatcttcttctgggtcgcccggatgatgatgatgggcatccacttcatgggggatgtgcccttccgcaccgtgtacctgcacgcgatggtgcgcgacgagaagggccagaagatgtccaagacgaaggggaacgtcatcgaccccctggacatcgtcctcggcgccccggccgacaagctccagccgacgctgaagaaccggttcccgcagggcatgccgccgttcggcgcggacgcgctgcgcttcacgctcgcctcgctcacccagcagggccgcgacatcaagctgtcgatggaccggctcgagggctacaaggccttcggcaacaagctgtggaacgccagccgcttcgccctgatgaacatgggcgacttccggatggaggccggcccgctggaccggagcacactgacgctggcggaccgctggattctctcccgcctccagcgcgccaccacggaggcgcgcgcgctgctggagtcgtacagcttcggcgaggccgcctccacgctctaccagttcctctgggcggagttctgcgactggtacatcgagctggcgaagggctcgctgtacggcgaggacgcggcggcgaaggactccacgcgccgggtgctcgtgtactgcctggaccgcatcctgcggctgctgcacccgttcatgccgttcatcaccgaggagatctggcagaagctgccgatggcccggccgacggacagcatcatgattgccccgtacccggagccggacgcggcgcacgtggacgaggcggcggaaggcgagatggcgccggtcatcgccgccatcgagggcctgcgcaccatccgcggcgagagcaacctgtcgcccgccaccaaggtgaaggcggtggtgcagagcgcggacgtgcgcacgcgcgagctgctggagcgctggcgcggctacctcatgccgctggccggcctgtccgaggtgacggtgggagcgccgggcgccaagccgccgcaggccgccgccttcgtgggctccaacctggagatctacgtcccgctggcgggcctcgtcgacctggacgcggagcgcgagcggttgaagaaggagattgcccgcgccgagcaggagatggccggcgtgctgcgcaagctggagaaccccaacttcgtggccaaggcgcccccggacgtggtggagaaggaccgcgcccgcgtcgaggagctgaaggagcgcaaggccaagcttcaggaccacctgcagcggattgccccggagcccgccatgccagagacgccgccgtccgagagcaccactcccgagagcagcacccccaccgcggaagagggtgcctccccctccgccccggcccaggtgaaggtcgccccgaatcaggaagagaagggcggcgtggacctgggccaggagctgaagggtgaactgggcgagaccggcaccgcgtccgaggccggggacacgcaggtgcaggacgcgctcgcgaagctgcgcgagggcacgaaggagggcctgtcgccatccgaccaccatgacctcggcgtggcgtacatgaccatggggctggtggacgacgcgatgcgcgagttcaaccgggccaaggagggtggcgacacccgcgagacgccggccgagggcgccgaggcggaggagggtgagtccggcccggtgaaggcccacggggacatgctgcccacgcgcgaggtgacgcagggcgagcccgtgcgctccgcctcgaagaagaaggcgaccgctcccggcaaggtgcacggcgacaagctggcgcccgccccgaccaccgaggaggccgaggcccccgcggtgaagaaggcggccgc

SEQ ID NO: 19 - protein, 358 aa, Angiococcus disciformis
VGRGLQPLPPDAPHPRPARCEGRRWQGLGAHGQPHLRPRRGESGPGRCRDGSHREGTHPPQSRSYLAMTADSMDATVPSRRPALGFIGGGVMAEALIGAVTGGGLAAPGTLLVGEVDEERRRVLREQYGVEVTADNLAAADAELVVLAVKPQHLGVVLQQLRGQLREDTIVVSIIAGARLQTLCEGLEHPLVVRAMPNTPARVRKAATFWIPSAGLSEPALVRVRSLLGALGTEVEVADEAGVEMATGLAGPMPAFVYFLIEAFIDAGVALGLPRDQATLATVESMRGSLELLHRSQESPAALRKQVTSPGGATLAGLKVFESAGVRDAMDAAVRAVHARAQELGRLPLAPLEPGKEG

SEQ ID NO: 20 - protein, 420 aa, Angiococcus disciformis
VPGVAVAVVSHGRVIVAKGYGFSNLEHQVPVTPDTLFQSGSLGKQFTAMAVMLQVEAGRISLSDSITKYFPDAPSTWAPITIRHLLTHTSGLSDGLLDLRKDYTDEEFAQFLYTLPLDFPAGLRWNYSNAGYVLLGLLVNRVAGTSYVNVLGEQVFKPTRMKTARGISEADIVPNRAAGYRLLDGVVKNQEWVSPSLNTTADGSLYFSLKDMLAWDDAVDDRAILTNGSWRDILSPVKLSSGASYPYGFGWFIEERNGQLVHQHAGAWQGFKTAYYRFTGDALSIIVLLNLAEPNPAAIANGIAAIVNPALAVPPLAPIPDLEPEVTARLATLLEQARAGALNPAEFAYVPGWFFTEAAPYYQSLLQSLGPSGPLVLAKREMRGDDRVYTYLVQAGSTMLRYRVALIPDGRVSAFALSPN

SEQ ID NO: 21 - protein, 184 aa, Angiococcus disciformis
VSIRRTTASTRNVTVSAMLDPALGSARDALQVFLEKALRAQFGADWQGTLERDRLAQGRPTSERWDWGSISYRLGHFRSPQATGSGVVTEPIVALARLAKAYRNLFQHEELTDAQVRHAMEGLALLQEALGNKTRAAETRAALEVWAGPPARAAKRPARKAPAAAKRAKPAAKKKAPKAKSARR

SEQ ID NO: 22 - protein, 351 aa, Angiococcus disciformis
MTSGTRKTGGDGARRNDKYRILSLDGGGLRTLLSIGLLKRIDQLRPGFLDQVDLVAGTSAGAISALIIAAAREPAVGLEQARQIWFTPGLFDSPLSNQLGALVGQSALMPSENMARALTHILGDKTLRDLKRKVVIPAFQLDDGDPDEDRRGWRPRIFHNFPGDTFVNLDDYLVDLALRSSSLPIVSPVHQGYVDGGLFANNPTMSAVAQAIYAKAADVRDILVFSLGTGDSVDYLDGYNENWGWRKWLLDPKQPMAFVAATIEAGVEAIDFQAKMLLPRGNYWREDPVVPFNLGNSVEAQIATLDRVVKRHDLSKVLEWVENSGWQPKATQETASGAQREFSGESGEARS

SEQ ID NO: 23 - protein, 351 aa, Angiococcus disciformis
MTIIHGQPGADGARRNGKYRILSLDGGGLRTLLSIGLLKRIDQLRPGFLDQVDLVAGTSAGAISALIIAAAREPAVGLEQARQLWLTHELFHSSLRTRLGAIIGMNALTPSKNMARALTHILGDKTLGDLKRKVVIPAFKLDDENPDENRREWKPRVFHNFPGADFVNPGDRLVDLALRSSSLPIVSPVYQGYVDGGLFANNPTMAAVAQAIYAKAADLRDLLVFSQGAGDMVHYLKGYNENWGWWKWLLNSKLPWALVDIAVAAGVEAIDFQAKRLLPRGNYWREDPRVPSHLGNSVEAQVVTLDQIVEKHDLSEALEWVDSSGWLPKGMHEAASGAQPELSGESGEARS

SEQ ID NO: 24 - protein, 405 aa, Angiococcus disciformis
MAARCRQARGASMTRILLFSGKGGVGKTTASAATAVAAAKRGYRTLVMSFDIAHSLSDSFDLDRKLFDFNEGLPQKVAPNLELQEIDIQHELQRQWSEVYNYMSVLLTSTGVSNMVAEEVAILPGTEDVISLIYLNQYVQQGRYDVIIVDCPPTGESLRFVNITSVLQWYIRRRFNVDRTLVKLARPLASRLTSYDLPEDSYFASLEQLFDRVKGIEGLLTDGNRTTVRLVSSAEKMVIRETQRAYLYFNMYGMTVDQVVVNRLLPDTEYFAQWHKSQSAYLDHIQEYFSPMPVARLPLLEHEVVGLERLEDLAQRLYGDSDPTERYISGQPYQFAKQHEGRYRLQLLMPGADRGDIVLDRQGNDLIIRVGGFRRHVMLPRSVAQLDAVDAVLDKGMLKIDFARP

SEQ ID NO: 25 - protein, 373 aa, Angiococcus disciformis
VNAVRPVMQLKGAGSAMRMTRILGEQELRQIVRATGLHALMDEVISTLEYELEHFDPANTELRKREGFQYQHPHPGVLEWMPVMQVGRHAVIKLVGYNPRSPEELGLPTILSSLSLYDVTTGHLRAVCDGTFPTALRTGAASAVASRLLAREDSRVLGLVGCGAQAVTQAHALSRVFPLGRVLVHDIAPEAMRSFARRVAFLGLEVVAVPLTRVEQEADILCTATSVAVGAGPVVSGRLIKAHLHINAVGSDLPGKTELPLEMLRRALVCPDYLPQAVVEGECQQLEPGEIGPSLFELTRSPEQWRSHRDGLTVFDSTGFSLEDKVVLEVILAHAERLGVGRLLQVESMAEDPKDPYGFLQETATCLKAAPAV

SEQ ID NO: 26 - protein, 219 aa, Angiococcus disciformis
MRILTDVFLRKYQRAPGPRERSLAADARSKLWLSVGLTAFLVPAYIEYFCRMLGLPKGELPWKLYDMLRERNEAPDLKQRFQQLEHLPEGSFGREFWKYCHSHGVPLPGHPHALPVHSAVHDFVHLLSGYGISIWEEMLTTAFSLGFMFGPRTRNYDPAQYKSLVPVRLLAEALPIPQLRRAVERGSAMSVDLFGDWDPWKVMELPLEEVKRMYNIQPE

SEQ ID NO: 27 - protein, 781 aa, Angiococcus disciformis
MGHEDSDKALPDSKANEVESSRNEAEWNELPISARDCEDLKKSCLLPSTVRKLGWRTDTDENNRKLLNWPEEWKGDAGGLVLVYPGLNYAKVKPHRPRVLRPKEAQLTLPTATFTDHILRPYTQDEVEGEPAKVKKYEAPFGYAPQIFDTAILCPMLQDEEVPMALIEGEKKAALLAQEGTPALGLPGISMAHDVEARRRSWDDLTDEWVPHPEAASYLAQGRTVFVCGDAPDMDGTNMNVVREVVRIAKGLSARGCDPQIPYVDHDPQHEKSGVDDWVHREMKKLLAAHHHKTEAWARQFLIVQYLASARPALPSALCDWLVEQHEAHGGVKEIEIKRALVWCSVWFSTEHGIFKKWVGTLKRKKVCKPEVIDRLVQALPRVENRFEPRTWVQHWMEKNGVTFVYASDGFQIGGRMFPASEFLSQIEIESTNERTCISVRNLGNAVRLWEADQRRGIVEQYREKLKFREDGRRGDAEEFIRATTGRLDPVDLVVVLHFIWQVKRKLFGKPVKDHLMPIFVGKQRGGKTTAIKSLLQPLGDLVGFPADLQFLTDERQQFRLTRCYGMFFDEMAKAERVASDVLKNRITAERIEYRVLGVQKLQTGTNNATFIGASNKQVKEIVVDPTGMRRFYQLDCLPQMNWTALEQIDFLAMWTSVDEKAESPLLGQLAQVQARQDEIRAKDSVEDFFERRCAQRDQWIKATALYGHYVEDLKYQGRDRMAFSLTKFGERMKELAGEENTGWKRSDGIKYRVTVKRWETEIDGVMESIAAGARMDLAHP

SEQ ID NO: 28 - protein, 332 aa, Angiococcus disciformis
MDTDKVALFGASGPIGHSIVKALREQGRAYRVVGRSRASLQSQFGADPKAEIATWNPDAPDTIRAAARGIRTLIYMVGVDYWRFQLHPELMRRTVDAAIAEGVERVVLIGTVYPYGRPRTTPVTEDHPREPHTFKGRMRKEQEDILLAADAAGKLRATILRLPDFYGPGIDKSFLHSAFVAAAQGKRAQLIGPIDPPHEYVYVPDVGPTVTALMDAPGAYGRWWNLAGAGVTSQRKLVEEIYAQAGHLAKFMTAGKGMLRLIGLFNPFMREMVEMHYLLTEPVLMDDSALHKLLGSVRKTPYSEGIRQTLEATRASLVSPAPAATGRPHPAP

SEQ ID NO: 29 - protein, 547 aa, Angiococcus disciformis
MAAKEIFFHQSAREAILRGVRTLADAVAVTLGPKGRNVVIEKSFGSPTITKDGVTVAKEIDLDNKFENMGAQMVKEVASKTSDKAGDGTTTATVLARAIYEEGLKLVAAGHSPMDLKRGIDKAVEVVVEELKKLSKPTADKKAITQVGTISANGDETIGSIIADAMEKVGKEGVITVEEAKGLETNLDVVEGMQFDRGYVSPYFVTNRERMEVVMDDPFILISEKKVSSMQDMIPILEQVARSGKPLLIIADDIEGEALATLVVNKIRGVLNVAAVKAPGFGDRRKEMLKDIATLTGGMVVSEELGHKYENLTLNDLGRSKRITVDKDNTTIVDGAGTKSEIEGRIKLIRSQIDTVTSDYDREKLQERLAKLVGGVAVINVGAATETEMKEKKARVEDALHATRAAVEEGIVPGGGVAFLRCLPALEKLKLGGEQDFGVEIIRRALQEPLRKIASNAGVEGAVVINKVREGQGAFGYNARTEVYEDLEKAGVIDPTKVERTALQNAASVASLLLTTEAMIADRPAKKKGKNGGGAGMPDYGGDDMDY

SEQ ID NO: 30 - protein, 746 aa, Angiococcus disciformis
VTRRCRCPSCPPRAGGACSVAWPAPYRARPRAPHSFRHPPCPRRPLPHPCPHRSRSHHPAPCLRPPSGPRPLRPSRSPPSRPRPAAPSAGACPRNRPPRRAGRTGARVSWDLSLEGAAQLTAERRGIGQQLRKARGGTGAQRLQRRLHGEVLGQHDEGGALGQRLGQLQRLAPIGRREVPAHHHAHRRRHRHQLRRGQHPRLQPQHVQGLGDEPRRRRVVLQHVHPPHFGPGGHHRRHRRLRGQRRAQQPAHLPDVVEGLEQVVHHAQLQRLLRRHQRRVARHQDDARVGVEPPRLLRQLQPGQARQVLVRDDEVHWRLAQQIQRFLAAGRLDDLALLAHQVAEDHADDGLVVHHQQPLAQLRRRVRGGEEYPEHGGRRGHVANGARRREANRRVVLLGDALAHRQPQSRAALVGGDVGLEDALAQLHGDARAPVRHVQHRRGALAREHHLHAPAAGHGVARVVQQVQRELLDEPRVALDGDVLGRLHLQRHARRVRVDAEQLRRRPDGRRQRQALLRRVPLAGEADVVGDDLFHPLHLRQQQPQRAGGATVLREQLRVGLHAQQGLPQLVQHLRRQLCRVRARTLQSRRRRARGRQISRLQGLEQLGERRGCFHGPSMAEAAVSTQRGRRDSVDPGPWPRGCSSRPLAPRPERGRHHRPREGLHAADQPVPLAGAPEDDRLRAGPLHPAEHRGGAGRHQPLRRPHRCHRQRGGQGHPPSRHGRGARARRPLLAADCPVGPRAGPA

SEQ ID NO: 31 - protein, 417 aa, Angiococcus disciformis
VTAVDNGLDAISRTRELRPDVVLADVMMPGKSGYEVCEALKSDPATQGIPVVLLAGTFEAFDENRARAARADDHIAKPFESQVLLDKVKALVGQKSNTMPASAATQVRPPTAQPATPAPVPPGPQPGAPTAARPGIPQGTQPGVPRPPGPGMPPGAPGAPRPPGPGMPPGPGMARPPGPGMPPPGAPGAPRPPGPGMPPGPGMARPPGPGMPPPGAPGAPRPPGPGMPPPGAAARPGRAASAGCVRAGHAAASGRARASGWAGAGMARPGIPQGSQPGFPRPPGGAAPLPPAPGGATQPAARARDPFGLGAPTAAPQAAQPSISIEDSLPEPSGAEEISLDMGGPPTAAPTAVAPTAAPATARPTAADGGEALLREALSKASREVIEKIAWEVVPQLAETIIREELERLIKDRETQH

SEQ ID NO: 32 - protein, 1102 aa, Angiococcus disciformis
MERNYFRAEATSDKPAFSIVLPPPNVTGSLHIGHALTATIQDILARWKRMSGFNTLWLPGTDHAGIATQMVVEKELKKTEGKSRHDLGRAAFLERVWEWKGKYGARIGEQHRFLGASLDWSRERFTMDEQSSAAVREVFVRLYEEGLMYRAQKLINWCPSCRTALSDLEVEHEESKKGSIWHIRYPVKDSDRTLTVATTRPETMLGDTAVAIHPEDERYLGLAGKSVKLPLTDREIPIIADAELVDPKFGTGVVKVTPAHDFNDYQTGLRHKLPMLTILDEAARMTKETGKYAGMDRFEARKQVLADLTEQGLLEKEEPHMLNVGTCQRCATVVEPRLSPQWFIKIEPLAKPAIEAVEQGRTKFVPESWTNTFFHWMRNIHDWCVSRQLWWGHQIPAYYCTSCSPRQGDDTDLPLDAPTVKVGGVDFARAEPIVAREQPKSCPKCGGASFIQDPDVLDTWFSSGLWPFSTLGWPRETPELKTFYPTSVMETGHDIIFFWVARMMMMGIHFMGDVPFRTVYLHAMVRDEKGQKMSKTKGNVIDPLDIVLGAPADKLQPTLKNRFPQGMPPFGADALRFTLASLTQQGRDIKLSMDRLEGYKAFGNKLWNASRFALMNMGDFRMEAGPLDRSTLTLADRWILSRLQRATTEARALLESYSFGEAASTLYQFLWAEFCDWYIELAKGSLYGEDAAAKDSTRRVLVYCLDRILRLLHPFMPFITEEIWQKLPMARPTDSIMIAPYPEPDAAHVDEAAEGEMAPVIAAIEGLRTIRGESNLSPATKVKAVVQSADVRTRELLERWRGYLMPLAGLSEVTVGAPGAKPPQAAAFVGSNLEIYVPLAGLVDLDAERERLKKEIARAEQEMAGVLRKLENPNFVAKAPPDVVEKDRARVEELKERKAKLQDHLQRIAPEPAMPETPPSESTTPESSTPTAEEGASPSAPAQVKVAPNQEEKGGVDLGQELKGELGETGTASEAGDTQVQDALAKLREGTKEGLSPSDHHDLGVAYMTMGLVDDAMREFNRAKEGGDTRETPAEGAEAEEGESGPVKAHGDMLPTREVTQGEPVRSASKKKATAPGKVHGDKLAPAPTTEEAEAPAVKKAA

SEQ ID NO: 33 - DNA, 21953 bp, Angiococcus disciformis
  CDS (1)..(7878): tubC
  CDS (18408)..(21953): tubE
ttgagcgccggagcgttgctcgcccacgccgcgagcctgggtgtacgcctgtgggtagagggcgagcgactgcgcttccaggctcccccaggggtgatgacgcccgagctgcagtcccgcctgggaggcgctcgccatgagctcatcgcactgctacggcagctccagccctcctctcagggaggcagcctcctggccccagtggctcgaaacgggcggctggcgctctccttcgcccagcagcggctgtggttccaggagcagctccaccctgaggccccggccaacaacctcacgggggccgtggtgttcaccggcccgctgcacgtggccgcgctgctcggggcggtggctgcgctggtgaggcgacacgaagcgctgcgcaccaccctgggcgaggagggcggagtcccctattcgctcatcggcgagccgtggcagccggcgctggaggtggaagcgctaccgggtgccaccgtgggcgagcggctggagcaggcccgagaggtggccctggccgagtcccggcgccgcttcgccctggagacggagccccacctgcgcgtgcgcctgctgcgcctggccgagcagcagcacgtgctggtgctcagcctccaccacatcgcggcggatggagtcgggctgcaggtgctcgaacaggagctggcggcgctctacggcgcgctgagcgctggggccgagccgcggctacctcccctgcccctgcaggtggcggaccttgccgactggcagcgccggtgggtggagggagaggagtaccaggtccagctcgcttactggcggcgacagctcgccgggctcacgcccctggaggtaccaggagatcatcctcgcccgcgtatcccctccatgagaggcgcggaggtacgggcgcccctgctctccgctccgcaagcccaggtgctgcgcgcgctggggcaaggcgagggcgccaccctctacatgacgctcctggccgccctgggcgtgctgctgcaacggtggacgggccagcacgatatggcggtgggcagcgccgccgccaaccgcaaccgcccgggcttggagggcatcctcggcttcctcctcaacatcgtcctgctgcggctcgacttgagaggccgcccccgcttccgcgagttgctgcgtcaggcacgcagggtgtgtgtggaggcctatgcccatcaggagttgcccttcgagcacctggtggaggcgctccagccaggcagcgagcgcggggacagctcgctctatcgcgtggcgctcgcggtgagcgacacgccatggatgcccggccacgggctgaagctggagggggtgcaagcgcagccgctcgactttccccggggggtgctggacctggatctccacctgtgggtgtatgacaccggggaggggctcaccgggcggttggagtacgccgtggatctgtatgaggagcccacggcaaggcggctcctggagggcttccgccaggtgctggaggcggtggtggaggcgccggatcggcccgtgccggagctgccggtgctgggagagcaggagcgccaccaggtgctctccgggtggaaccgcacacagcgcccctatccgcgagaggccagcgttcacggcctctttcagcagcgtgccctccaggccccgcgggccgtggcagtggtgtatggcgagcgcagcctcacctacggcgagttggcggagcgggcccgcgggctcgcacagggtctggtggcccgaggcgtgcggcgaggagacctggtcgcccttcggctggagcgctcgccggagcaggtggagtccatgctggccgtactccaagccggggccgcctacgtgccgctggatccttcctaccccgtacagcgccaggagttcatgctccaggacagcggcgcgcggttgctcgtgcacagcggcccgctgcccttcgctccccagggctgcgccacgctggatctccaggcatggcaccccgctccctccgacggtggcgagcccctgccccagtgcagcggagaagatctggcgtatgtcatctatacgtccggctccaccggccagcccaagggcgtggccgtgtgccaccgggccatgacccgcctggtgtgcaacacggactacgttcagctcgggccagaggatcgggtcgcccaggcttccaatgcctcctttgacgcggccaccttcgaggtctggggcgcgctgctcaatggggcacggctggtggggctcgccacggaggaggccattcaggcgcgccggctggccgaggtcctgcgcgagcagcggatctccgtgctcttcgtcaccaccgccctcttcaaccacgtggcccgggagcaaccccaggccttcagcaccctgcgctacctgctctttggcggcgaggcagtggatgcctccagtgtgaggcgggtgctgaaacagggcgctccaggacaccttctacacgtgtacggccccacggagaacaccaccttctccaccgcctggcgggtggaacacctggccgagcaggcgcataccgtgcccatgggtcatcccatcgccaactcgcggctgcacgtgctggacgaagcgctgcagccggtgccggtgggcgccatgggcgaggtatacctgggaggtgatgggctggcgctgggctactggcgccaccccgaggccaccgcggagcgcttcgtgccggatccgcacggcctggagcccggaggccggctctaccgcacgggagatctggcgcggcggcaggcggatggggccgtggtgttcgctggccgcgtggacaggcaggtcaagctgcgaggcttccgcgtggagccggcggagatcgagtcgcacctgtgcgagcactcggaggtgtccgcggcggtggtggagctgcggggcgaaggggccctgcggcggctggtcgcctatgtcgtcccccgcgccggtggccgcccaggtgccgaggagctgcgcaccttcctccgcacccgactgcccgagtacatgctgcccgccagcttctccctgctggaggcactgcccctcacccccaacggcaaggtggatcgctcggcgctacccgagagcttcgaggaggcctcccgcgagcaggctccggtggtacctccacgaggccccgtggaggcgctgctggtggacatctggagggaggtgctcggcacccaacgggtatccgtgcacgacgacttcttcgacctgggcggacactccctgctggccacgcgggttgtctcccgcttgcgagaggcgctgcaggtggagttgccgctgcgcaccctcttcgaggcccctcagctctcggcgctggcggcccaggtggaggtcctgctcggccaccggcagctccgcccccctccgctcgtgcccgctgtacgtccaccagagctgcccctctccttcgcccagcagcggctgtggttcctccagcagctcgcgccacaaagcaccgcctaccagatcctggatgcgtggcatgtgcggggccgggtggacgtgggcgccctggagcgcgccctggagcagctcgtgcgccggcatgaggcgctgcgcaccactttcgagcctggcggcgacggcgtgcctcggcagcgcatccacgcgccggctccggtcccgctgcggcaggtggacctgcgctcccatggcatcgccgcgcgggaggaggccttgcggtggatgcgcgagcaggcgctccggccactggagctggacaaggggccgctgctgcgcgtgtccctgctgcgcttggaagaggcacagtccctgctcttcctcgagctgcaccatatcgtgggcgatggctggtcgctgagcgtttggagccgagagctgtcgcacctgtacgaggcggcgctccatggcgctgagccggggttggcgccgctgcccgtgcagtacgcggacttcgcgctgtggcagcgcggctggttgcaagggccggtgctgcgggaggagctgacctggtggcgggagcggctcgcgcgcctggccccgctgcgcctgcccgcggaccatgcccgcccggaagtgcagcgcttcaacggcgcgacgtaccgcttcacgctcccgggcgtacgggtgcaggcgctgcggcggctcgggcatgagcacggggccacactcttcatggtgttgctcgccggcttcaatgcgctgctggcgcgctacaccgggcagacggacatcgccattggcgcgcccatcgccaaccgcacacgtggggaggtggagggcctcatcggcttcttcgtcaacaccctggtgctgcgcacccgcctggaaggcaacccctccttcctcgagctgttgaggcgggtgagggagacaacgctagaggcctacgcccaccaggagctgcctttcgagaggctcgtcgaggagttgcagcccgagcgccaggccaaccagaacccgctggtgcaggtgctgctcgccctgcagaacgcgccccgcgagccgttgcggctggcgggcctggaggccgagcacctggagtacctggtggccaccacgcgcttcgacctcgagctgcacctgtgggaggaggaagaggggctgagctgcatcgccgtgtatgaccgcgcgctgtacggcgcggggacggtggagcggctggtgggcgcctggtgcacgctgctggagggcgtggccgagctcccggcgcgccgcgtggcggagctgcccctggtgcctgcccgggagctgcgacaggttccgccgccctcccccgccgcggcgatcgaaacaagcatcggcgcccgcttctcggaggtggcgcggcggcagccaggcgccacggccgtcacccaaggcgggcggcacctcacctatgcagagctggaggagcgctcggaacgcctggcccgctacctggcctggctgggcgtgcgcgcgggcgacagagtggggttggccaccgagcgcacgctggagcggatcatcagcctgctaggcatcctcaaggcgggagccgcctacgtaccgctggatgtgcgccagccagcgcgtcggctgagcctgctggtgcaggccgcgggcgtgcgcaccgtcatcgccgaggagcaggctcgcacggtgctgtcaggcctggggcagccactgaccctggtcgatgccgcccaggagccggcctccgcgcagcaggtccccgcgctcgggccggagcgctcgctgggcggggacatgctcgcctacgtgcttttcacctcgggctccaccggcgagcccaagggcgtctgcattccccaccgtgccgtgctgcggctgatccatgagccctcctacgtccagctctcgccgcgggaggtcatgctgcactacgcaccgctggagttcgatgcctccaccttcgaggtctggggggcgctgctcaacggggcaaggctcgtgctggtccctccggaacagcagtcgctcgagagcctgggacaggagctgagcacccagggcgtcaccgtgctgtggctcaccgccgggctcttccggctcatggtggaggagcagctcaagagcctgcgcggcgtgcgccagctgctcgccggaggggacgtgctgcccatgccgcaggtacgccggctgcgcgaggccctccccgagtgccagctcatcaacggctacggccccaccgagagctgcaccttcacctgctgtcaccgcgtgggcagcccccaggagctgggcggctccgtgcccatcggcacccccatcgacctgggctgggtgagcgtggtggacgagcggctccagcccgtgccggacggagccccgggcgagctgctcgtgggcggccccgggctggcttgggggtacctgcaacacccggagctcaccgccgagcgcttcatccccgatccgctcagccggacgccgggggctcgcgtctatcggacgggagacctggtgcggcgcagggaggatgggacgctggagttcctgggccgcgtggaccaccagctcaaggtacgcggcttccgcatcgagccgggcgaggtggaggccgcggtgctcacccacccggcggtgcagtccgcggtggtggtggggcgcgagggccccggcggcaaggagctggtctgctacgccgtgccgcgggtggagagctcggagcagggctcgcagcaggagcagcggctggtacacgagtgggagtccgtgttcgacgggcacatgtaccgcgaagcccccgtgggcggagagccgaccttcaacatcgtcggctggaagagcagctacaccggccaacccgtggccgtggaggagatgagggactggctgcgccaccgggtggagcgcgtgcgcgggctcaggccacgacggatcctcgaagtgggctgtggtacggggctgatgctctttgccctgctgccgcactgcgagcgctacgtgggcacggatttctccccggcggcgttggactacgtgcgtcgctacctccccccggagcacccgggccgcgtggagctgctacaccgcacggcggacgagtggagcggcgtggcggccggctccttcgacgcggtgctgctcaattcggtggtgcagtacttcccctcgcaggagtacctgcggcaggtgctggcccgctgcgtggaggccgtggaggacgggggcttcgtcttcgtgggggatgtgcggagcttgccgctgctggagtccttccacgcctcggtggagctggagcgggccgccccctccatgccgctggaggcgtggcgcgagcgggtgcggcgtgcggtgctggaggacaacgagctggtggtggacccggcactcttcgtggcgctggcccatcagcatccacgggtgagccacgtggatatcgagctgacgcgcggcacgcacccgaatgagatggcacgcttccgctacaacgccgtgctccacatcgggccgcgcacgccgccaccggcctccgaggtgccgtgggtggactggtccacgcaaggactgagcctcgatgcactgcgggctcggctccggcagggcccgccagggccactgggggtggcaggcattcccaatgcgcgagtgctgcccgcggtccgggccgccgaggcgctgggcagcacaggcagcgcgcggcgggtggaggagctgcgccggcgcctgtcccaacccggcacaggggcccaggatccagaccccttctggcaactggccgagtcgctcggctacacggcggcagtgagctggtctcctgggcggagggacggggccttcgacgtgctcttcctcccggcgacgccagggatgcacccgcggtggctcggccccacgccgctcaaccgcacgccgcccccagcctccgcgcgtctgtcctcggagcctcggcgggccagcctctcactgaggctgggctccgcgctgcgggcccacctgcagacccatctaccagacttcatggtgccctcacgcttcgtggtgctgcagtccctgccgctcactcccaatggcaaggtggaccgcgcggccttgcccgtccccgactcgcgtcggctggaatctgccccgctggtgccccccagcaacgagctggagcgggtgctggcgcaggtgtggaaggaagtgctgggactggaggaagtgagccgggaggacaacttcttcgacgtgggagggcactcgctgctgctggcgcaggtgtgcagccggctggaggcccgactgggccggcggctcgaactggtgaccctcttccgctactcctccattgctgccctggccgagcacctgcaggccccccaggagctggcagccgccgaggcgcaggtgcagcgcatggccacggagcgcgccttgctccagcaacaggcagcccaacgccgccgggccggttcgaagcggggagctcccaatgacacctagtggggatgaagcgctgcagtcttccatcgccctggtaggcatggccggccgcttcccgggggccccggacgtggagtccttctggcgcaatctggtggccggagtggagtccatttccttcttctccgaggaagagctgagacaggcgggcgtgtccgagcagatacgtcggcgccccgagtacgtgcccgccaagggtgtgctggaagacctggagctgttcgacgcgggcttcttcggctactcgccgcgcgaggcgagccacctggatccgcagcaacgcctgctgctggagtgctcgtgggaggcgctggaggatgcgggccttcgcccggatcagctcccaggctgggtgggcgtctacgtgggcgccggggacaccagctaccgcttccagctgctgcgcggacacggggacccgctcagcggctccaaggatgtggcgggcttctttggcaactacccggactttctcgccacgcgcgtggcctacaagctcaatctgcgcggccccgcgctcggcatccacaccgcgtgctccacctcgctcgtctccatcaacatggcgtgcagcgcgctgcgcggcttcgagtgtgacatggcgctcgcgggcggcgtctcgctgcggctgcccgcgcgctccggctacctctacgaggaggggggagtcgcctcgaaggacgggcactgccgccccttcgacgcgcgtgctaccggcaccgtcacgggggatggcgtgggcgtggtggtgctcaagcgcctggaggacgcgctgaaggccagggatcccatccacgcggtgatccgcggctgggcgctcaacaacgacggcgcctcccgggctggcttcaccgcgcccagcgtggagggccaatccgaggtgatcgccctggcgcacgccgcggcgggcatcagcgcacgcgacatcacctacgtggaggctcacggcaccggcactcccctgggagacccgatcgaagtggcggcgctcacccgcgccttccgggcgcataccgctgacaccgccttctgtaccctcggtgcggtcaaatccaacatcggacacctggatgcggcggcaggagtggccggggtgatcaagacggtgcaggccctgcgccaccggctcatccctcccacgctccacttcgagcggcccaatcccgcgctccacctggagcagagccccttcttcgtcaacacccagccgctcccgtgggagagcccgcgcgggcctcggctggcgggggtgagctcctttggcattggcggcaccaacgcccacacgctcttcgaagaggctccgccgccgcccgccagcggccccacccgtcccaaccaggtgctgctgctctcggcccgaagcaccagcgcgctcgagcacatcgcaggacggctcgcggcacacctgcgccgccacccggacctggaactggcggacgtggcctttaccctccaggtggggcgagcccgcttcccctaccggcgcgccctcacctgtcgcaccctggccgaggccatggagcgcctggaggctcccgagccgcggccacccgagccgcttgctcacgagggagagcggccccctctcgtcatgctctttccagggcagggcactccgctggtcggcacggcccgtgcgctccatgaatccgagcccaccttccgccaggcggtggagcagtgtgcccggctcctgaggcagacgctggggctggatgtcagggaggtgctcttcccctccgcggagcaggaggagcaggcacgccggctggcggcgcagacgcgggtggcccagcccgcgctcttcaccctggagtatgccctggcgcagacctggctgggctgggggctccaaccgcaggcgctggcaggccatagcctgggcgagctggtggcggcgtgcctcgcgggtgtcttctccctggaagatgcacttcagctcgtggcagcccggggacagctcatgcagggatgcccaccgggggccatgctggccgtgccgctgccggaggccgagctggcggcgctgctgggcagcgagctgtgtatcgccgcggtgaacgggccacgggcctgcgtggcctcgggtcctctaccggcggtagaggcgctcaccgccgcgctggagagccggggcgtgtccagccggcgcctggagacttcccatgccttccactctgcctccatggaggcatgccaggggccactcaccacgctgctgcggcgcatgcgcctgcaggcccctcgcctcccctgtgtctccggcctcaccggccggtggctcaccggcgaggaggccacggagcctacgtactgggcccgccagctccgcgagccggtacgtttctccgaggccctcgagacgctctggagcctcaaggagccagtgctgctggaggtaggccccggcaccacgctcaccgcgcttgcgcggcggcaccccacccgccccgcccgcacccaggaggtggcgagccttcccgtgcaaccggacacggccgtgccgtgcattgaagaggccgtgggtgagctgtggcaggccggcctggagctggactggagcgccctgcacgccgcgccacgccaccgcgcacaccttccaccctaccccttcgagcgccagcgctactggattgaaccggaggctgccccgcagccgcgcgcgcagcagccgacgcccgcgtcccttgtgcccccggagcagccctcgcgcgaggccctggaagactggttctacgtgcccacctgggagcaggcacctgccacgagcggggggggacagcccctggcgggcccggtgctcgccttcatggactcctcgggcctggccgagcaggtgctggccgcgctgtggcccgcggactccggcgcgctcctcacccgcgtcgagccggccgggcactatgagcaactcagtgagcacgccttccgcctccgccccgagagcgaggaggactgggacgcgctcttccaggcgctccagtcccagggccggctcccccgtcgcatcctccatgcctgggctctcaccgcggagcccggcccctgtaccccggacggggaagcggtgctggaacagggcttcttcagcctgctgcggctggcccgtgcgctcggccgccacgcgcctgagcgccctgtacagctcgaggtgctgtccagcttcgtccacgcggtgggcccgcgggagccgctcgagccgctcaaggccacgctgctgggggcctgtgcggtacttcccctggagtaccctcacgtgcagtgccgcaccattgacgtgcggcccgggagcgagccacgggaagtgctggtgaggagcctggccgccgagctggccgctcccatgggagagagcccggtggcctggcgcgacgggcagcggtacgtgcgccgcgccacccggcagaggctcgaggcctcgcggcccctgcgcagccttcgggagcgaggcgtgtacctggtagcaggagggctgggtggaatcggcctggtgctggcgcgagcgctggcccagcgggcgcgtgctcggctggcgctactcacccactcgcccttccctccccgagagcagtgggagcagtggctggaggaagccccggcgcacccggagccggcgtggcggagcgaggccgacccctcggagcgccgcaggacccagcaccgcatccgctgcctgctggagctggagcagctcggcgccgaggtgcaggtgtacacggcggacgtggcggaggaggccgccgtgcgctcggtggtggagcaggtgcacgcccgctgggggaagatccacggcgtgctgcacgccgccgccacgttcgacgacggcgtcatccagctccgcacgcacgagcagtcctcgcgggccctgcgcaccaaggtgcggggcagcatggtgctgcacgaggtgctggcgagcgaggggttggattggttcgccctgtgctcctcgctggcgtcggcgctgggctcattcggccaggcggactactgcgcggccaatgccttccaggatgcgtatgcgcaccacctgcgccggcagggcttcacgggagcgctggcgctggactggggcacgtggagagatacgggggcggccatgcggctggtggcacgcacccgacgggggggccatgagaagccgcccacgccgctcacccacccactcttcgattgcgaacagcgcgagccgggcgggacgcactggctcggcctcacgctgaggggtggagaggactgggtggtggacgagcaccggctgcaaggggtgccaacactgcccggggtggcctacctggagctggcgcgggcggcgtgtgcccaggcgctgggggccgaggcggtggagctggcggagctgttgctgctggagcctctgacggtacctcgaggcgaatccaggcaggtccgggtggtgctccagcccgaggggcaggctcatgccctgcgggtggagagccggtcggaggaagcgcggggatggaatgagcatgcgcggggccgggtgcgcgccgtgcctcggctggccgagcgcatccagcccgagctgctgcgcgccgcctgcgaacacgagcagcccgtgcccggagagccccaggagcaaggccctgtccacgccggagcacgctggcatggcctcttccagtgggttcgccgcggccctcgccaggccctcgcccagctcgcgctaccggagcccttccacggtgacctcgagcgcttcgagctccacccggcgctcatggacatggccaccagcttcgccattcccggcggagtgccctggctcgcctttggctatgagcgcgtgctcattcacggtccgctgccaccgcaggtgctcagccacgtgagcctgcccgaggagtcgcaggctggcgcgcaacaactccggctacaggtgcggctgctggatctggagggctgggagcgggtgcggatcgatgggtacctgctgcggccgctgaagcccagcgacgccagtgtcgagccggcggcgcccaacgtggaagtcgccgtggggacgccggggctgctggagagccttggcctgcgccgctgcacccgccccgcccccgggccgcgccaggtggagatcgaggtggaggccgctgggctcaacttcctggacgtgctgggcgcgctggggatgatgccggcattggaggcggaggagagcgtactggggcgcgagtgctccggacgcattgccgccgtgggcgagggcgtcagcgggctgcgcgtgggggacgaggtgctggcggtggccccaggctgcttccgctcctacgtgctggtggatgagagccaggtggtgcgcaggcccgcctcgctggggctcgccgagggggcggcccagatggtgccgttcgccacggcgtacttcgccctgcacaccgtgggccggttgcggcgcggcgagcgcatcctcatccacgccgcggccggagggctgggtctggccgccgttcagctcgcatcccggaccggggcggagatattggccaccgcgggcagtgagcagaagcgcgagtacctgcgctcgctcggcattgctcacgtgctggactcgcgcagcacctccttcgtcagcgaagtgcgcgagcgcaccggcgggcgtggggtggatgtggtgctcaactcgctggcgggagagctgctcctggcgggcctgtccgtgctggccccgcacggccgcttcctggagctggggaagagggacctgtatgcggaccagcaggtgggcctccgaaccctggcccgagggcagactttcgccgccattgacttcggtccccaccacccggacttccgagcggtgctcgaggaggtggccacgcaactcacccagggccagctcgagccattgcccacccgcctcttccccgcgcggcaggtggccgaagccttcagcttcatggcccgcgcgctgcacatcggtcgcgtcgccgtctccatgcagggggcgacggcattgcccgcgtccatgactcggggctccaggcccgcaccggtggccgtacctccttgggaggacccgcggctggcgggcggcatctcctctgaagagggtgcggaggccttcctgcgcgcgttggagcaaggggcaccgcagctcatcatctccccccaggacttcagctcgctgctgcgcggcctgggcggcagccagggcgtgcgcgaaaaggagcgcctcgtcaccgggcgcgccgccgccgccgagccgcaggccttgccaccctcctcgctggagcagctcatcgagcaggtgtggcgcaagcacctgggtgtggagcgcgtgcagcccacggacagcttcttccagcttggaggagactcgctgctgggcatccaagtggcggcggatctccgcaggcacctgggtgtggagctgcccacggccaccctcttcagccaccccaccctcgccgcgctggccgcggctctgcgggctcgacagggtgaggccgcggctcccactgcccccgcgccagcgctcgtgccggatccagccgcgcgcttcgagcctttccccctcacggatgtgcaggaagcctactgggtgggtcgccgctcggccttcgagctcggcggcgtcgccgcccatggctacttcgaaatcgaaagcccggggctggaggtggagcgcttcatccaatgctggcgccagctcctgcagcgccacgacatgctgcgcatggtggtgctcccggatgggcggcagcaggtgctcgagcaggtgccggagtacacgccggaggtggtggagctgcgggggctctccccccaggaggccgagtcccgccggctccagctgcgtgagcgcatggcccaccaggtcctgcgcagcgaccgctggccgctcttcgagctggtgctctgccggtacgagggaggcgtccgcatccacatgagcatggatgccctgatgctggatgcgtggagttcagcggtgcttcggcaggacttcgcccagctgtaccacgagccgggccggccgctggagccgctggccatcaccttccgcgactacgtgctggcggagcgccggctgcgcgagggcgaggcccatgagcgcgcccgcgcatactggtgggctcggctggacacgctgccgccaccgcccgagctgcccctggtgaaggaaccctcgcagctggagcacgcgcggttcacccaccgcgaggctcggctcgagccacaccgctgggcccggctccaggagcgggcgcgcgcccacggcctcaccccctcggccgcctgcatggccgccttcgccgaggtgcttgcccgctggagccgtcacccgcgcttcaccctcaacctcaccctcttccagcgcttgcccctgcacccgcaggtggacgagctggtgggcgacttcacctccctggtcctgctggaggtagaggcacacgcggcgagcaccttcgccgagcgtgcctcccggctccaggcacagctatggcgggacctggagcacggcagcgtgagcgccgtgcagctcatccgcgagctcgtccgcaccggccgccgctccccgggcgccatcatgcccgtcgtcttcaccagcatcctcagcctggatgcgcggcgcggcccccagggcagcctctccttcttcgagggagaactggtgtacagcatcagccagactccccaggtgtggctggaccacggagtccacgaggaggagggggcgctcgtcctggcgtgggactcggtggaggcgctcttccctccgggcatggtggacgacatgttccacgcctaccagcggctgctgggggcactcgccgaggaggagcaagcgtgggagggcgagctgccggagctgctgcctcctgcccagcgtgagttgctcgcgcgctacaacgccacccaggcgccgcggcccagcggacggctggaggagggcttcttcacccaggcgcggctccaccccgagctccccgcgctgctcgcaccggagcgcaccctgagctacggcgagctggcaaggcgagcccaggcgctggccgcgcgcctacgcgagctggaggtgcagcctcaggagttggtggccattgccatgcacaagggctgggagcaggccaccgccgtgctcggcgtgctgcaggcggccgcggcctacctgccgttggatccagagcagccgccgctccggctccaccagctcctggaggaggggcccgcccgcgtggtgctcacccagtcctccttgctgcacaccgtgccctggccgccgggtgtgcaggtgatcgccgtggacgaactcgagcctgcaaccgaggcccccccgctaccgcctcgcggtacaccggagcacctcgcctacgtcatctatacctccggctccaccggcaaacccaagggtgtggccattgaacaccgggccgcgctcaacaccgtggtggacctcaacacccgctttggcgtcggcccggaggatcgggtgctgggcctgtccgcgctcaccttcgacctgtcggtgtacgacgtgctggggctgctcggcgcgggcggagcgctggtgctgcccgcggcggaggcggagaaggatcccgcccactggtgggagcggctggtggctgggcgggtcacggtgtggaactccaccccggcgctgatgctgctgctggtggagtacgccgagcagcgcgggctgaagctgcccgcggcgctgcgcctggtcatgctcagcggcgactggatccccgtggcgctaccggatcgcatccgcgcactcggcagggacgtgcaggtggtgagcctgggaggcgccaccgaggcttccatctggtccattgcctaccccattggccaggtggcaccgcagtggaagagcattccctatggcatgccgctggccaatcagcgattccacgtgctggacgggcggctggaggcacggccctggtgggtgccgggcgagctgtacattggcggcgaggggctggcacgcgagtactggagggatgagccgctcaccgcaacgcgcttcatccgtcacccgcgcacaggcgagcggctgtaccgcaccggggaccaagggcgcatgctgcccgaagggagcatcgagttcctcggccgggaggatctgcaggtcaaggtgcagggcttccgcgtggagctgggggagattgaagcggcgctggcccagcacccggcgctatcggcgagcgtggtggtggcacgaggagagcctcggggagtgcggcggctggtggcctacgcggttcctcgctcgggtcagacgcccgcggcaggcgagctgcgccgctacctggcggagcggctacccgcgtacatggtgccctccgccttcgtcctcctggagtccctgccccgcagccgcaacgggaagatcgcccgagatcagctccccgagccgcagcagacacagggactggctgcacaggccgcggcggccgacccgctcgtggagcggctggcagccctggtgaaagaggcgctgaggctcgagcgcgtggagccccaggacagcctgctggacctgggggcggactcggtggcgctcatccgcctcatcaaccgcctggaggcagagctgcagttccgcccgcgactggccgacatctacgagaaccccaccgtgcaggggctcgccacgctccaccaagagaagacaaagagccagggagagggaggcgctccgcggctcacggcgccccgctccacgcttctgcccgccgaggagtgggggcgcttcaaggccaaccgcccgggcctgcgccgcttccccgatggaacgcctgaggtggcactgccaggcagcggcttggcgccggcccccgaggagctgacagctctcgagcgccgccgcagtgtgcgcacctactccctcgagcccgtgagccatgagcagttgggacggctgctggcccccttgcgcgagtgggaggtgcagggctcgcggcgttacctctacgcctccgcgggcgggctctacccggtgcagctctacctccacctcaagcccggccgggcgcgagggctcgagcccggcacctggtattacgatcccagcacccatcggctggtgctcctgtccgccggagccgggctggatcgccgcatccatgatccgcaccagaaccaggccatcttcgactcggccgcgttctccctcttcctcatcgcccgcatgggggccgtggagccggtatacgccgaacatgccctgcacttcgccacgctggaggcagggctgatgacccagcttctcgatctgggcgcggctcccagtgggctggggctgtgccatatcggcgacctggacttcgcccaggcgcgggggctcttccacttggaggaggagcacgtgctgctgcacagcctggtgggcggagtactccccactcgggggcaggaggcggcctcggtgcccgctgagggaggaacggaggcgcggcaactggcgcagctcctgcaacaggtgaagacgctcacgcccgaggccgcgcgagcgctgctcgaggcccgccgcggcagcaaggggagaccacatgagtaagctgcacgaggagctggagagcctggcgccggagcagcgggagctactcgcggccctgatgaaagagcagggcctggacgagggcgcattgctgatgcccgtggagcgcaagcccgaggggctgccgctctcgtccgcccagcagcgcatgtggttcctgcaacagctcaggcctacgagccccttctacaacgtgcacgcggcgctccggctcacgggaaagctgaaggtggagtgcctggtgcacagcctgaatgagttcgtccggcgtcacgagccgctgcgcacggtgttcccctccgccggaggtcaacccctgcagcgcatcctcgcgcccgcaccggctgcgctcgagcagcgcgacctgagcggcgtgcccgcccaggagcgagaggccgaggtgtaccgcgcggtggagcacgcagcgctcgcctcctttgatctggagcgagagccgccgtgccgcttcctcctggtgcgagtggagccggaggaacacgtgctggtgttcgccacgcaccacatcgcagcggatggctggtcgctcggcgtcttcgtgcaggagctgtgcgcgctgtacacggctgctgtacacgcggagccaccggcgctgccaccgctgcggctgcagtacgcggacttcgccgcgtgggagcggagccggctcaagggtgggcgcgagcgcgagctgctcgagtactggcaggagcagctggcagggctgccggacctgagcaccctgccgccagagcggcccaggcccccgctgtccaagcaggagggcgccacgttcgaattcgccctgccaccacaccaggtgcaggccctgcgctcacttgctcaagcgcggcgcacctcgctcttctccgtgctgctcgccgccttccaatggctgctggcccggtgcgccggccaggacgacgtggccctgggcatgcccatcgccaaccgcaaccgcaaggagctggaaggcctcatcggctgcttcgccagtaccctggtgctgcgcgcgaagccctccgcctcgaccgccttcacctcatggctcgcccaggtgtccgagcagctccacggcgccctcgagcaccaggaggtgcctttcgaacgattggtggaggtgctccagccccggcgccgcatggatcggcacccgctcttccagatcttcctcgccatgcagcagcacccgctgcggcgcgccgagctgccaggcctgctgctctcggagttcccccttcgcagccgcgtggcccgcttcgatctggagttccacctctgggagtctgcccagggcgtcgagggcaccctcatctacgacgtggacctgtatggccaggagggcgtagcgcaactggtgcggcgctacgtgagcctgctcgaagccgtggcggcggacccgacgcggacactgggggagctggcgggtgagacgctggccccgcccgtacggaagcaggttctcgccctgtcggagtgtccgcccctcccacgcccgagcacagcccctcggacactggccgaggcacttctacagaccgccgagcgcttccccacggccacggtcagcttcgtccaggcacagggctcttgcacggcctggactctgccagagctggtggagcgggcccggcgcctgcaggccggcttgcggcagtggggattgcggccgggcgacagtctggtgctggtgctggggagggaggaagagacggtagaggcactctgggcctgcgtgctggcgggagtggcgcccctggtgctaccggcgccgcccgcgagagcggaggcgagtcccgcgctctcacgtctgcggcatgcccggcagctgctgggtgggccccgggtcctcacccggcaggagatgctgcccgatcttgccaggcagcttcaggtctcgcccaccgccgacatcctgggggccgtggaggagctgagagccacgggtggcgaggcgcccctgcccccagggcgcatggatgacgtggccctgctcaacctcacctcgggcaccaccggcaaggccaagtgcgccatgctcacgcaccgcaacctgctggtgcgcctggaggccaccaacgtcgtctacgagtcccagccgctcgagcgcggcctcgtctggttgcagctgcacaacattggcgccctgtccgagtaccacctccgcccgctctgcgccggcatgcacaccttccacgctcccaccgaggaggtgctcgccgagcccctgcgatggctggagtggctcgagcggtatggcattgcacagacgtgggcgcccagcttcgcctacagccacctgctggagcggctgcgcaaggtggaggaccggcgctggagcctgggaggcgtgcgcgtgctgctcagcgccggagagcagatctccgcgcccatggtggaggagctgatgcggaggttggctccctcgggagtgcgggaggatgccttcgtcgctgcctggggaatgaccgagacggcttcgggggtgacctatgcgcggcggcccggaacgccgccccgcatgcacaccctggagcgcgcgagcttgagcggtccgcttcggcacgcggcacccgcttcgcccaccgcgctgcggctgatggatgtaggagcccccattgccggcaccgccctgcgggtggtggacgcgagcggcgagctgctctccgaggagtgcgtggggcgcattcaagtgcgcggcgagatgatctctcccggctactacggggacccgaaggcctcggcggcgctgctcaccgccgacggctggctggagacaggcgatctgggcttcctctccgagggagcgctgaccattaccggccgcgccaaggatctggtcatcatccacggcaccaacttctcctgctacgagatcgagtccgcggtggagcaggtggagggagtggcgccctcctcggcggcggcggcggcggtgcggatgctcgaggggagcagggaggagctggcggtcttcttcgtgcccacggagggactcgctccgcaaccccctgcctcactcctgtcgcgcatccgccagcaggtgctcgagcaggtgggggtgcggatcgatcatctcatcccgctcgagcctcaccagctcccacgcacggagggaggcaagctgcgccgctcggagctgagggcgcgcttcgaagcaggtgagctgagggcgccgcaacccgctccggtcccgagcccctcgcgcccgctggagcagctcatcgcctccgtctgggcggaggtgctcgagcaccaggacatcgcgcccgaggccagcttcttcgacctgggcggcaactccatcctcctggtgcgcgtggagcgggcactgcgcgcgcggctcggcctggagctgacgctcatggacctgttcgcctaccccacggtgcactcgctggcggactacctggagcctcgagccgcccagctgccagcacaggcctcccctcccacgcaggccgagcgccggcgggggatgcgcggcgcggcgctggagcagagacgcactcgccgccaggcacaacgggacgaggactag

SEQ ID NO: 34 - protein, 2625 aa, Angiococcus disciformis
LSAGALLAHAASLGVRLWVEGERLRFQAPPGVMTPELQSRLGGARHELIALLRQLQPSSQGGSLLAPVARNGRLALSFAQQRLWFQEQLHPEAPANNLTGAVVFTGPLHVAALLGAVAALVRRHEALRTTLGEEGGVPYSLIGEPWQPALEVEALPGATVGERLEQAREVALAESRRRFALETEPHLRVRLLRLAEQQHVLVLSLHHIAADGVGLQVLEQELAALYGALSAGAEPRLPPLPLQVADLADWQRRWVEGEEYQVQLAYWRRQLAGLTPLEVPGDHPRPRIPSMRGAEVRAPLLSAPQAQVLRALGQGEGATLYMTLLAALGVLLQRWTGQHDMAVGSAAANRNRPGLEGILGFLLNIVLLRLDLRGRPRFRELLRQARRVCVEAYAHQELPFEHLVEALQPGSERGDSSLYRVALAVSDTPWMPGHGLKLEGVQAQPLDFPRGVLDLDLHLWVYDTGEGLTGRLEYAVDLYEEPTARRLLEGFRQVLEAVVEAPDRPVPELPVLGEQERHQVLSGWNRTQRPYPREASVHGLFQQRALQAPRAVAVVYGERSLTYGELAERARGLAQGLVARGVRRGDLVALRLERSPEQVESMLAVLQAGAAYVPLDPSYPVQRQEFMLQDSGARLLVHSGPLPFAPQGCATLDLQAWHPAPSDGGEPLPQCSGEDLAYVIYTSGSTGQPKGVAVCHRAMTRLVCNTDYVQLGPEDRVAQASNASFDAATFEVWGALLNGARLVGLATEEAIQARRLAEVLREQRISVLFVTTALFNHVAREQPQAFSTLRYLLFGGEAVDASSVRRVLKQGAPGHLLHVYGPTENTTFSTAWRVEHLAEQAHTVPMGHPIANSRLHVLDEALQPVPVGAMGEVYLGGDGLALGYWRHPEATAERFVPDPHGLEPGGRLYRTGDLARRQADGAVVFAGRVDRQVKLRGFRVEPAEIESHLCEHSEVSAAVVELRGEGALRRLVAYVVPRAGGRPGAEELRTFLRTRLPEYMLPASFSLLEALPLTPNGKVDRSALPESFEEASREQAPVVPPRGPVEALLVDIWREVLGTQRVSVHDDFFDLGGHSLLATRVVSRLREALQVELPLRTLFEAPQLSALAAQVEVLLGHRQLRPPPLVPAVRPPELPLSFAQQRLWFLQQLAPQSTAYQILDAWHVRGRVDVGALERALEQLVRRHEALRTTFEPGGDGVPRQRIHAPAPVPLRQVDLRSHGIAAREEALRWMREQALRPLELDKGPLLRVSLLRLEEAQSLLFLELHHIVGDGWSLSVWSRELSHLYEAALHGAEPGLAPLPVQYADFALWQRGWLQGPVLREELTWWRERLARLAPLRLPADHARPEVQRFNGATYRFTLPGVRVQALRRLGHEHGATLFMVLLAGFNALLARYTGQTDIAIGAPIANRTRGEVEGLIGFFVNTLVLRTRLEGNPSFLELLRRVRETTLEAYAHQELPFERLVEELQPERQANQNPLVQVLLALQNAPREPLRLAGLEAEHLEYLVATTRFDLELHLWEEEEGLSCIAVYDRALYGAGTVERLVGAWCTLLEGVAELPARRVAELPLVPARELRQVPPPSPAAAIETSIGARFSEVARRQPGATAVTQGGRHLTYAELEERSERLARYLAWLGVRAGDRVGLATERTLERIISLLGILKAGAAYVPLDVRQPARRLSLLVQAAGVRTVIAEEQARTVLSGLGQPLTLVDAAQEPASAQQVPALGPERSLGGDMLAYVLFTSGSTGEPKGVCIPHRAVLRLIHEPSYVQLSPREVMLHYAPLEFDASTFEVWGALLNGARLVLVPPEQQSLESLGQELSTQGVTVLWLTAGLFRLMVEEQLKSLRGVRQLLAGGDVLPMPQVRRLREALPECQLINGYGPTESCTFTCCHRVGSPQELGGSVPIGTPIDLGWVSVVDERLQPVPDGAPGELLVGGPGLAWGYLQHPELTAERFIPDPLSRTPGARVYRTGDLVRRREDGTLEFLGRVDHQLKVRGFRIEPGEVEAAVLTHPAVQSAVVVGREGPGGKELVCYAVPRVESSEQGSQQEQRLVHEWESVFDGHMYREAPVGGEPTFNIVGWKSSYTGQPVAVEEMRDWLRHRVERVRGLRPRRILEVGCGTGLMLFALLPHCERYVGTDFSPAALDYVRRYLPPEHPGRVELLHRTADEWSGVAAGSFDAVLLNSVVQYFPSQEYLRQVLARCVEAVEDGGFVFVGDVRSLPLLESFHASVELERAAPSMPLEAWRERVRRAVLEDNELVVDPALFVALAHQHPRVSHVDIELTRGTHPNEMARFRYNAVLHIGPRTPPPASEVPWVDWSTQGLSLDALRARLRQGPPGPLGVAGIPNARVLPAVRAAEALGSTGSARRVEELRRRLSQPGTGAQDPDPFWQLAESLGYTAAVSWSPGRRDGAFDVLFLPATPGMHPRWLGPTPLNRTPPPASARLSSEPRRASLSLRLGSALRAHLQTHLPDFMVPSRFVVLQSLPLTPNGKVDRAALPVPDSRRLESAPLVPPSNELERVLAQVWKEVLGLEEVSREDNFFDVGGHSLLLAQVCSRLEARLGRRLELVTLFRYSSIAALAEHLQAPQELAAAEAQVQRMATERALLQQQAAQRRRAGSKRGAPNDT

SEQ ID NO: 35 - protein, 1181 aa, Angiococcus disciformis
MSKLHEELESLAPEQRELLAALMKEQGLDEGALLMPVERKPEGLPLSSAQQRMWFLQQLRPTSPFYNVHAALRLTGKLKVECLVHSLNEFVRRHEPLRTVFPSAGGQPLQRILAPAPAALEQRDLSGVPAQEREAEVYRAVEHAALASFDLEREPPCRFLLVRVEPEEHVLVFATHHIAADGWSLGVFVQELCALYTAAVHAEPPALPPLRLQYADFAAWERSRLKGGRERELLEYWQEQLAGLPDLSTLPPERPRPPLSKQEGATFEFALPPHQVQALRSLAQARRTSLFSVLLAAFQWLLARCAGQDDVALGMPIANRNRKELEGLIGCFASTLVLRAKPSASTAFTSWLAQVSEQLHGALEHQEVPFERLVEVLQPRRRMDRHPLFQIFLAMQQHPLRRAELPGLLLSEFPLRSRVARFDLEFHLWESAQGVEGTLIYDVDLYGQEGVAQLVRRYVSLLEAVAADPTRTLGELAGETLAPPVRKQVLALSECPPLPRPSTAPRTLAEALLQTAERFPTATVSFVQAQGSCTAWTLPELVERARRLQAGLRQWGLRPGDSLVLVLGREEETVEALWACVLAGVAPLVLPAPPARAEASPALSRLRHARQLLGGPRVLTRQEMLPDLARQLQVSPTADILGAVEELRATGGEAPLPPGRMDDVALLNLTSGTTGKAKCAMLTHRNLLVRLEATNVVYESQPLERGLVWLQLHNIGALSEYHLRPLCAGMHTFHAPTEEVLAEPLRWLEWLERYGIAQTWAPSFAYSHLLERLRKVEDRRWSLGGVRVLLSAGEQISAPMVEELMRRLAPSGVREDAFVAAWGMTETASGVTYARRPGTPPRMHTLERASLSGPLRHAAPASPTALRLMDVGAPIAGTALRVVDASGELLSEECVGRIQVRGEMISPGYYGDPKASAALLTADGWLETGDLGFLSEGALTITGRAKDLVIIHGTNFSCYEIESAVEQVEGVAPSSAAAAAVRMLEGSREELAVFFVPTEGLAPQPPASLLSRIRQQVLEQVGVRIDHLIPLEPHQLPRTEGGKLRRSELRARFEAGELRAPQPAPVPSPSRPLEQLIASVWAEVLEHQDIAPEASFFDLGGNSILLVRVERALRARLGLELTLMDLFAYPTVHSLADYLEPRAAQLPAQASPPTQAERRRGMRGAALEQRRTRRQAQRDED

SEQ ID NO: 36 - DNA, 2200 bp, Angiococcus disciformis
  CDS (44)..(970): ORF26
  CDS (973)..(2181): ORF25
  modified_base (2195): a, c, g, t, unknown or other
gggagcgcgctcggcaagggcaggcgtctgttagggtctacctatgaggttacgtcccatgccccacgttcccgggctattgctggtgctgctgtccatggccgcatgggcagccgaagcgcagacggcccccggcccttcccttcgtttccgccgcgtgcccctcactggaaagcccgaggtggtgcggctcgcaacgggcattcccgcgacgctcaacttcgacgcggagatcaacccgcagaaagtgcggctggatgctccggcccgcgtcaagattttgagcaccggggagcgctccgtcaccctgcttgccgagggcgatttgggcgaaggggtgactttgcgcgtgccgttcctgactgagccctccctcgcggaacccgcctttcagctcgtcacggcttcggacgtggcggattcgcaggtgatggtctaccgcagcgccaacgcgccggagttgatgcaagcacggctgacggagttggaggcccgcagcgccgcgtgcgaggcgcaactttccaccgagcgcgagcgcagcgaggccacgggccccgccgcctgggtcctctcccggcaagttgatgagggcggcgtgagcgttgtcatgctcaagcgactgtccgacgtgggcacggcgggcattgaggcaacgtccgttcgccgcttcctggcggataagtgggcggtgctccaagtgcaagtgaggaacggctctgggcagccttggcggccagggcgggcatggctggaaagtgcggccaccaggcgcctcacggaagcgcgcacggtgagcatggcgccggaagtgctggcgcccgaaggtaagagccgcgtggtggtggagtttgccgggaagcccgggagcaagggggaagtcttccgattggtggtagaggacgcagacggcgtccggcccctctcagtcgcgggcgtggtgatgaaggacacagcgcaggagaagagcggcccatgatgaccgtggatccccccaacttcctcaagcccggcgcccgcctcggggccccctaccggattcgcggttggaagggcggcggtgcctatggcgaggtgtacgagtgcgaaaggcagggcaggccctacgccctcaagctgtccaagcaccgccagtccagcgatgacccgggcaagacggaccaacggctgctgcgggagttggtgtgcctcgtccaactggaccacccgaacattgccaaggtgctgggctggacacgcactgacgagggttacggctatctggtgctggagtacatcgaggggtggacgctggcccaatggctccagcaaacgcgccccaccgtcgcccaagtcctgcacgtcttcgccaaactgacgggggcgctcgcgtacatgcaccgcaggggcgttcggcaccgggacgtgtcgctgtctaacgtcatggtacgcaaggcggacggcgagcccgtcctcattgacctcggggcgggggactactccggggcgcatgagttgacggactggcccttgcccccgggcaccgaccgctaccgctckcccgargcggcccgcttcctcaaggyacaccagaacgacccgagcgcccggtacgacttccccccggaagatgacttctactcgctggcggtgtgcctctatgacgcgctgacggacgcggagcccgccctcaaggcgaacgcacgcaaggccccgcgcctcaacgtcaacagccccaccatggccccgcccccggcccgcaaggtcaacccgcgcgtgcccgaggtagtgagtgcctgggtagagcggtggctggtgcgtgacgtggaaacccggcggcccgcgttggccgccatgcccggcgcgctggaagagttggcgaagcaaggcggcgcggagtggctggccaccgttcagcccccaccggaagcgggcaccccggcccccgagcaccggctctaccggaagcggcggcgcgtgctggcgtgggccatggccgctggcgtgctcgtggctgtcgcggcgctcgcgtggctgcgcgctgccccctctccagacgcgccgccgtcccaggtcgtaccggaggcaccaagcacgccgcaggcgccagccccggacagtccaccaaccccgcccgtgccgtcttcgggtgcagtaccggtccccatcccaggtgtccctgttgagaaggaaagccctctgtgagtacccccacgaantccgg

SEQ ID NO: 37 - protein, 309 aa, Angiococcus disciformis
MRLRPMPHVPGLLLVLLSMAAWAAEAQTAPGPSLRFRRVPLTGKPEVVRLATGIPATLNFDAEINPQKVRLDAPARVKILSTGERSVTLLAEGDLGEGVTLRVPFLTEPSLAEPAFQLVTASDVADSQVMVYRSANAPELMQARLTELEARSAACEAQLSTERERSEATGPAAWVLSRQVDEGGVSVVMLKRLSDVGTAGIEATSVRRFLADKWAVLQVQVRNGSGQPWRPGRAWLESAATRRLTEARTVSMAPEVLAPEGKSRVVVEFAGKPGSKGEVFRLVVEDADGVRPLSVAGVVMKDTAQEKSG

SEQ ID NO: 38 - protein, 402 aa, Angiococcus disciformis
  MOD_RES (197): Ala or Val
MMTVDPPNFLKPGARLGAPYRIRGWKGGGAYGEVYECERQGRPYALKLSKHRQSSDDPGKTDQRLLRELVCLVQLDHPNIAKVLGWTRTDEGYGYLVLEYIEGWTLAQWLQQTRPTVAQVLHVFAKLTGALAYMHRRGVRHRDVSLSNVMVRKADGEPVLIDLGAGDYSGAHELTDWPLPPGTDRYRSPEAARFLKXHQNDPSARYDFPPEDDFYSLAVCLYDALTDAEPALKANARKAPRLNVNSPTMAPPPARKVNPRVPEVVSAWVERWLVRDVETRRPALAAMPGALEELAKQGGAEWLATVQPPPEAGTPAPEHRLYRKRRRVLAWAMAAGVLVAVAALAWLRAAPSPDAPPSQVVPEAPSTPQAPAPDSPPTPPVPSSGAVPVPIPGVPVEKESPL

SEQ ID NO: 39 - DNA, 21 bp, Artificial Sequence
  Description of Artificial Sequence: Synthetic primer
tgggaatcatttgaaggttgg

SEQ ID NO: 40 - DNA, 22 bp, Artificial Sequence
  Description of Artificial Sequence: Synthetic primer
tgtgtttttctttgttagaccg

SEQ ID NO: 41 - DNA, 21 bp, Artificial Sequence
  Description of Artificial Sequence: Synthetic primer
cacccggacctgcctggattc

SEQ ID NO: 42 - DNA, 21 bp, Artificial Sequence
  Description of Artificial Sequence: Synthetic primer
tgctcggctggcgctactcac

SEQ ID NO: 43 - DNA, 24 bp, Artificial Sequence
  Description of Artificial Sequence: Synthetic primer
gctcccgggccacgtggttgaaga

SEQ ID NO: 44 - DNA, 23 bp, Artificial Sequence
  Description of Artificial Sequence: Synthetic primer
ccgcgggccgtggcagtggtgta

SEQ ID NO: 45 - DNA, 17 bp, Artificial Sequence
  Description of Artificial Sequence: Synthetic primer
tggcagccagcccgagc

SEQ ID NO: 46 - DNA, 19 bp, Artificial Sequence
  Description of Artificial Sequence: Synthetic primer
ccgcgggtgccctctcatc

SEQ ID NO: 47 - DNA, 70782 bp, Angiococcus disciformis
gcggccgccttcttcaccgcgggggcctcggcctcctcggtggtcggggcgggcgccagcttgtcgccgtgcaccttgccgggagcggtcgccttcttcttcgaggcggagcgcacgggctcgccctgcgtcacctcgcgcgtgggcagcatgtccccgtgggccttcaccgggccggactcaccctcctccgcctcggcgccctcggccggcgtctcgcgggtgtcgccaccctccttggcccggttgaactcgcgcatcgcgtcgtccaccagccccatggtcatgtacgccacgccgaggtcatggtggtcggatggcgacaggccctccttcgtgccctcgcgcagcttcgcgagcgcgtcctgcacctgcgtgtccccggcctcggacgcggtgccggtctcgcccagttcacccttcagctcctggcccaggtccacgccgcccttctcttcctgattcggggcgaccttcacctgggccggggcggagggggaggcaccctcttccgcggtgggggtgctgctctcgggagtggtgctctcggacggcggcgtctctggcatggcgggctccggggcaatccgctgcaggtggtcctgaagcttggccttgcgctccttcagctcctcgacgcgggcgcggtccttctccaccacgtccgggggcgccttggccacgaagttggggttctccagcttgcgcagcacgccggccatctcctgctcggcgcgggcaatctccttcttcaaccgctcgcgctccgcgtccaggtcgacgaggcccgccagcgggacgtagatctccaggttggagcccacgaaggcggcggcctgcggcggcttggcgcccggcgctcccaccgtcacctcggacaggccggccagcggcatgaggtagccgcgccagcgctccagcagctcgcgcgtgcgcacgtccgcgctctgcaccaccgccttcaccttggtggcgggcgacaggttgctctcgccgcggatggtgcgcaggccctcgatggcggcgatgaccggcgccatctcgccttccgccgcctcgtccacgtgcgccgcgtccggctccgggtacggggcaatcatgatgctgtccgtcggccgggccatcggcagcttctgccagatctcctcggtgatgaacggcatgaacgggtgcagcagccgcaggatgcggtccaggcagtacacgagcacccggcgcgtggagtccttcgccgccgcgtcctcgccgtacagcgagcccttcgccagctcgatgtaccagtcgcagaactccgcccagaggaactggtagagcgtggaggcggcctcgccgaagctgtacgactccagcagcgcgcgcgcctccgtggtggcgcgctggaggcgggagagaatccagcggtccgccagcgtcagtgtgctccggtccagcgggccggcctccatccggaagtcgcccatgttcatcagggcgaagcggctggcgttccacagcttgttgccgaaggccttgtagccctcgagccggtccatcgacagcttgatgtcgcggccctgctgggtgagcgaggcgagcgtgaagcgcagcgcgtccgcgccgaacggcggcatgccctgcgggaaccggttcttcagcgtcggctggagcttgtcggccggggcgccgaggacgatgtccagggggtcgatgacgttccccttcgtcttggacatcttctggcccttctcgtcgcgcaccatcgcgtgcaggtacacggtgcggaagggcacatcccccatgaagtggatgcccatcatcatcatccgggcgacccagaagaagatgatgtcgtggcccgtctccatgacggacgtcgggtagaaggtcttcagctccggcgtctcacgcggccagcccagcgtggagaacggccacaggccggacgagaaccaggtgtccagcacgtccgggtcctggatgaaggacgcgccgccgcacttcgggcaggacttcggctgctcgcgcgcgacgatgggctccgcgcgcgcgaagtccaccccgcccaccttcaccgtgggggcgtccagcggcaggtccgtgtcgtcgccctgccgcgggctgcacgaggtgcagtagtacgcgggaatctggtggccccaccacagctggcggctgacgcaccagtcgtggatgttgcgcatccagtggaagaacgtgttcgtccaggactcggggacgaacttcgtgcggccctgctccaccgcctcgatggccggcttcgccagcggttcaatcttgatgaaccactgcggagacaggcgtggctccaccaccgtggcgcagcgctggcaggtgcccacgttcagcatgtggggctcttccttctccagcagcccctgctccgtgaggtccgccagcacctgcttgcgcgcctcgaagcgatccatgccggcgtacttgccggtctccttcgtcatccgggccgcttcgtccaggatggtgagcatgggcagcttgtgccgcaggcccgtctggtagtcgttgaagtcgtgcgccggcgtcaccttcaccacgccggtgccgaacttcgggtccaccagctccgcgtccgcgatgatgggaatctcgcggtcggtcagcggcagcttcacgctcttgccggccagccccaggtagcgctcgtcctccgggtggatggccaccgcggtgtcgcccagcatcgtctccgggcgtgtggtggccacggtgagcgtgcggtcgctgtccttgacggggtagcggatgtgccagatggagcccttcttcgactcctcgtgctccacctccaagtcgctgagggcggtgcggcacgaggggcaccagttgatgagcttctgggcccggtacatcaggccctcttcgtacaggcgcacgaagacctcgcgcacggcggcggaggactgctcgtccatggtgaagcgctcgcggctccagtccagcgaggcgcccaggaagcggtgctgctcgccgatgcgggcgccgtacttgcccttccactcccagacgcgctccaggaaggcggcgcggccgaggtcgtgccggctcttgccctcggtcttcttcagctccttctccaccaccatctgcgtggcgatgccggcgtggtccgtgccggggagccacagggtgttgaagccgctcatccgcttccagcgcgcgaggatgtcctggatggtggcggtgagcgcgtggccgatgtggaggctgcccgtcacgttgggcggcggcagcacgatggagaaggcgggcttgtcggaggtcgcctcggcgcggaagtagttccgctccatccagcaggcgtaccagcgggcctcgacctcggtgggctcgtaggccttggacagttcagtggtgtcggtcattgcggacggccagccccgggggaaccggggccggcgggaaggtcttggagagaggttaaggcgaggaacgcgtcagtgctgcgtctcccggtccttgatgagccgctcgagctcctcacggatgatggtctccgccagctgcggtaccacctcccaggcaatcttctcgatgacctcgcgggaggccttcgagagcgcctcgcgcagcagcgcctcgccaccatccgcggcggtcggacgggccgtggccggagcggcggtcggcgccaccgcggtcggagcggccgtcggggggccgcccatgtccagggagatctcctcggcaccgctgggctcgggcagcgagtcctcgatgctgatggaaggctgggctgcctgcggcgccgccgtgggagcgcccaggccgaacgggtccctcgcgcgggccgccggctgggtcgcgccacccggcgcgggaggcagcggcgcggcgccgcccggaggacgcgggaagcccggctggctgccctggggaatccccggacgggccatgccggcgccggcccacccggaggcgcgggcacgcccggacgcggcggcatgcccggcgcggacgcacccggcggaggcggcacgcccgggacgcgcggcggcgcccggaggcggcatgcccgggcccggaggacgcggcgcgcccggagcacccggcggcggcattccaggccccggcgggcgggccatgcccggtcccggcggcattccaggccccggaggacgcggcgcgcccggagcacccggaggcggcattccaggcccgggaggacgggccatgcccggccccggcggcattccaggccccggaggacgcggcgcgcccggagcacccggcggcatgcccgggcccggaggacgcggcacgcccggctgggtgccctgcggaatgcccggacgggcggccgtgggcgcgcccggctgcgggcccggaggcaccggcgcgggagtggccggctgggcggtgggcgggcgcacctgcgtggccgcggaggccggcatggtgttggacttctgccccaccagcgccttcaccttgtcgagcagcacctggctctcgaagggcttggcgatgtggtcatcggcgcgggcggcgcgggcgcggttctcgtcgaaggcctcgaaggtccccgccagcagcaccacggggatgccctgggtggccgggtcgctcttcagggcctcgcagacctcgtagccgctcttgcccggcatcatcacatcggcgaggacgacgtccgggcgcagctcgcgggtacgggagatggcgtccagcccgttgtccaccgcggtcacctgaaagtcctcggtcgcgaagatcatcccaatcaccttgcggatggtgagcgagtcatcggcgaccagcagattcttgggcatcggttcgggcctcggggggcgtcccacccccctgaattcgttggagattcctgccgcgaaaaacccaggtcgcggccctgtatcaagcggggcagcttacgtttcgcgctccagcacgatcaagaaaacatgcgctgcaggtccaggaacagcacggagcctgtcaacccgggggcacggaaggctccaatggtggtctccggctcgaagtgctgcagcacgccgagcacccgggtggccgtcagccccacgttccggccggccagctccgtgaggatgaagagggcctcgggtaccgggggggagcccagcagcgcggggaccgagcagatgggccacagcacctgggcgtgcgggaagatgccggccaccggcccgctctgcacgggcaggacgctgaaggcctcccctcgcgatatcacctgggagacgaagcccagcgggacgccgaacaggcgcccctgcgattcgaagacgagcgccttgtcgggcgtggactcggcccagtggacggggcgcagggccgcgggcgcggcacgagggcccacccggtggggcagcgcctcggcgatgagctccaggtagagccgctccttgtgcagcaccgcgccccggctcaggggggccagcgagtccgccagcccggggggcaggaggaagaacggcgcccgcgccacgtcggcgacctccaccacggagcgcacccgcacggccagggtgggactcacgtcgagcaccaccaccatgcccggcccctcctcgggcaagccgccgagcagggccgacaggtccttcacctccagcacgccacgcaggctggagccgttggcgccgggcatggccacttccatgacggaggtggcctccaccgcgtagcgcgtctctcctgcctccacgagaaggcagagccggcgtccgctttcgaagggtgacacggccctaccctagcagccttcctcgccttggtggtaagccatcgagccagatggcgcgcatcctcctcgtcgacgacgaaaagatcgcccgcaccctctacggcgactacctcacggccgtggggcacgccgtcacggcggtgggctcgctccaggacgcgcgggaggcgctggccggggaccgcttcgacgcggtggtgacggacctcatcctccccggcggcgacggcatggaggtgctgcgccacgtgcgcgagcgccaccccggcgtggaggtggtggtcatcaccggcctggagaaggtggaccccgccgtgcgcgccatcaagagcggcgcggccgagtacctcgtcaagccggtggcccccgaggccctccagcatgccgtccgccgtgccctcaccacgcgagacctcctccaggagaacgcctcgctgcgccggcacgtcgccatgctggaggccggccagcgcatcgccaccacgctggagcgcgagaagctggcctccgccaccacgagcgcgctggagtccatggcctgcgccagcgccgtggtgctgctggagcgcgacggcgacaagggcctgcggctccagggcgtccgcggactgcctccgcggcacgagccggagctggtggccaccctcgtcgagcgcctctcgaacgcgcgcgcgccccgggagctggaagggctggacgccgccttcccgcgcgtcctctccatccccgccgtggagggcaccacggtgctgggccacgcggtgctcttcttcgacggcgccgagccggagtggaccggcgagacggcgggctacctggtgcgcaactgggcactggcgctgcgcaacctcgggcgcttcgcggcggtggaggacctggcgtacgtcgacgacctcacccgcctcttcaacacgcgctacctgcacctggtgctggaccgcgaggtccaggactccgtccagacgcagcgccccttcagcctgctgttcctggacctggaccacttcaagtccatcaacgacacgcacggccacctcgtgggctcgcggctgttggtggagacggcccgggtggtgaagggctgcgtgagagaccacgacgtggtggcccgctacggcggcgacgagtacgtggtgctcctgcgcaacaccgactccggcggcgcgctcaaggtggcggagcgcatccgccgcaccatggagacgcacctgttcctcgcgcgcgaggggctgtcgctgaagctcagcacgtgcatcggcgtggccagcttccccgagcacgcccgggacaaggccacgctgctggacctggcggaccgggccatgtaccggggcaagcgtggctcccggaatgtcgtctacatggcggccctggatctggagccgctgccggcggagcggcgccagggcggcagcggccccggcggctccagcacgtagcggctcagcggcgcaggttgcccacggtgaggcgcttggtcggggtggtctccacctcggcgcgtgctcccccgccctccttgcccaccgcctccacctcctcgtgcggggcaccggtggtgatgagccggtacttctccgaggcctcgcggtcatgctgggcctgctcggggtccaaccgggcaatcagctgccagaagagggcggcgtgctcgcgctcctcgtccatgacgtgacggaggatggccttggcctcctcgttgtcggtggcatcgatgtgggcggcgtagaggttgatggcgtccagctccgcctcgatgttcagccggatggagcgggccagctcggagtcggtcatcttccggggcaccagcgagtggaacgggttggtctgcggcatgaaggccctcccgaggccggtggtggcgtccacgttctggacggggcgccaggggacgcgaggagcatccgcgcggccaggggcccgggtcaacggaatccctccgcccgcgttgcgtagataccgctgcctccgccatgctcgggccatggaaacacccgcgccgctctcccagttgctccaggccctggaggcgggagatctgccggccgcgcgcgcggcggcggcggctctgcaacgtgcgggcgcgcactcggcacagctggcggcggaggtgctgcacgagctgcggcagcccctgctgggcgtgaaggcctacgcgcagctgctcgcggaggacggtggccccaccggcccgctgcggctgctgctggcgcaggtggagcggatggaacagatcgtctccgactacatccgcctcgccagcgagcggcacgcgccgcagcagcgcctgtcgctggcggcgcccatctgggcggcggcgaagctgttcagcgtcaacccggactcggcgcgcatgtctctggaggtggaggcgcccgaggacatcaccatccagggcaacgcgcggctcatcgagcagctcacgctgaacctgctgaacaacgcgcgcgacgccatggccggccgcgggcgcgtgaaggtggtgctctcgcgcgagggcgcctctccggtgctgtacgtggcggactggggcccgggcatccccgtggagctgcgcgagcgcatcttcgagccctacgtcaccgccaacaagcgcggcacgggactggggctggcggtgtgcaagcgcatcgcccaggagcacaacgcgacgattggcctcgcggcgccgggcgccattcgcgacgtgcccccgccggccaccgtgttccgggtactcttccccgccacggacgcgccgccgcagctgcgcaagcggctgctggtggtggacgacgagaccatcatccgcatggtcttccgcgacctgatgggcaaggagtgcgaggtcatcgaggcggccagcggcgaggaagcgctggatttgctgcgccaggcgccagtggacctcatcgtcacggacaagaacctgccgggcctgtccgggctggagctggcgcagcaggcgcggcggctctactccaactcgcgcgtcatcctgatgacgggctacccgtcgctggtgacgacgcagcaggcgctggagctgggcgtggtggactacctgctcaagcccttcgacgacatccggcaggtgcgcgggctgttgcgcacgacgctgtcctcggagccgccggtgcctccggtggtggcccccggggccgaagtgcggcgggtggacgtgctggaggacaacccgacgacggcgcggctcatctccgaggccctggacatgctggggctggaggcgcgggtgctgccctcgacggagctgatggcgatggcgacgccggtgggcgtggtggtgagctgggacttcgcgccggcctatgggcgcaaggcgctggagctggccaaggcgctggcccagggcgcccccttcgtcgtgctggccgagcacctcaccatggagacggcgctggagtcgctgcgcgccggtgccgccgcgtgccttccgaagctgctgtccgataccacggcgctcagccgtgagctgagccgcgccttcaagagagaggtcccatgagactcgcgctcctgtccgtcctgctcttcgcggtggcctgttcctcggacaagcccccgccgacggagcggccggacgggggcgcgacggaggactccgggacgggcggagaggacgcgggcccgacggaggacggaggcacggagccggatggtggctccggctccgatgcgggcacggatgcgggagcgggcgacgcgggcacggtggatggcggaagctgtgaggcgcccgcggccgagcccgatacggagctggccacgcgactgaacacgccccgccggctcgcggtggacacgacggacatctacatctccgagtcacactccctgaacccccagcagccgagtccgggaccgggacaggttctgaggctgccccgcgcgggaggtccacccacggttctggccacgggcttccgcgcaccagacgccatcgccgtggatgggacgagcgtctacgtgctcgacctggacgggctctggcgggtggacaaggcaaccgggaagcggggcgacctgcccatcgacgcgacggatcgcaacgtcaccgtcggtggtaccgaggtgctccgcgccacgctcgccggacgcgacgtgctggtggtcgctacggggcggcagtcgctggtccgggtggacaccgatggcggcaactcccaggttctctacaccggtcccggcggctccctggtgcgtggcgcgcgagtggtggactcggacgtgtggttcctcgtcagcgcggggacgggagccggaaacagctcgggtctgtaccgcgtcccgctggacggcagcgcgcccgcggagcggcgggacgccaccatcctccaaggcaattcactggaggtgacccccacgcacttcctcgtcaccgagggcggtgggggtaccggccgggtgttgcggctgccccgcgctggaggcaccgccgaggtgctggccgacggtctccagggcccgtggttcccggtggaactgaatgggaccatctacttcaaggagtcacgtgccgacggcgcggacttcctgcgccgcgtgcgcacgtgcgcgctggggacgtcggatccggtggggcccccgggcacgggaccaggcgggctcatcgtggacggcagcaccctcctctacacgtcgcaggagagcggcaccggcggcgccgtgggccgcgtgccctgacgccctcctccacccccgaaaagaccacggccccggcgcctcgcgaggaggcatccggggccgcgtcctgcatcagtggaacacctcaccggctcggcgggcccgaggcctcatcggccccggaccgccgtgagcggctcagtagtccatgtcgtcgccgccgtagtccggcatcccggcgccgccgccgttcttgcccttcttcttggcggggcggtcggcgatcatcgcctcggtggtcagcagcagcgaggccacggacgcggcgttctgcagcgcggtgcgctcgaccttcgtcgggtcgatgacgccggccttctccaggtcctcgtagacctcggtgcgggcgttgtagccgaacgcgccctggccctcgcggaccttgttgatgaccaccgcgccctcgacgccggcgttggaggcgatcttccgcagcggctcctggagcgcgcggcggatgatctccacgccgaagtcctgctcaccgcccagcttcagcttctccagcgcgggcaggcagcgcaggaaggccacgccgccgccagggacgatgccctcctcgacggccgcgcgagtcgcatgcagcgcgtcctccacgcgggccttcttctccttcatctcggtctcggtcgcggcgcccacgttgatgacggccacgccgcccaccagcttggccagccgctcctggagcttctcgcggtcgtagtcgctggtgacggtgtcgatctgcgagcggatgagcttgatgcggccctcgatctcgctcttggtgccggcgccgtcgacgatggtggtgttgtccttgtccaccgtgatgcgcttggagcggcccaggtcgttgagcgtcaggttctcgtacttgtggcccagctcctcgctgacgaccatgccgcccgtcagggtggcgatgtccttcagcatctccttgcggcggtcaccgaagcccggcgccttcaccgcggccacgttcagcacgccgcggatcttgttgaccaccagggtggccagcgcctcgccctcgatgtcgtcggcgatgatgagcagcggcttcccggagcgcgccacctgctccaggatgggaatcatgtcctgcatcgacgagaccttcttctcgctgatgaggatgaaggggtcgtccatgacgacctccatgcgctcgcggttcgtcacgaagtacggagagacgtagccgcggtcgaactgcatgccctccaccacgtcgaggttggtctccaggcccttggcctcctcgacggtgatgacgccctccttgcccaccttctccatcgcgtccgcgatgatggagccgatggtctcatcaccgttggcggagatggtgcccacctgggtgatggccttcttgtccgccgtgggcttggacagcttcttcagctcctccacgacgacctcgacggccttgtcgatgccgcgcttgaggtccatggggctgtggccggcggccaccagcttgaggccctcctcgtagatggcacgcgccagcaccgtggcggtcgtggtgccgtcgccggccttgtcggaggtcttcgacgcgacctccttcaccatctgcgcgcccatgttctcgaacttgttgtcgaggtcgatctccttggcgacggtgacgccgtccttggtgatcgtgggcgaaccaaagctcttctcgatgaccacgttgcggcccttggggcccagggtcaccgccacggcatccgcgagggtccggacaccgcgaaggatggcctcacgcgcggactggtggaagaaaatctccttcgctgccatcgcaacctcctgaaattactgggggatttaactgtgacgacgctggccgttagcactcggccatggcgagcgccaacataagggccagcgaaatgatgtcaaccaggaagggcgtgcctgtgggcgagcggacggggccagggcccctcggggccgtctggccggggggctactcggcgaagcgcacgaggttgagcagctgacccatgtccaggggtttgcgcagcgtcagcgccacgcccttgcgcaggccccggtcggtgacgccctcgtcctgggcgcccgtcatcagcagcacgggaatggcctggaagcgggggtcggccttgagcatctccgtgaagtggatgccgtccaggtggggcatgaggtaatcggtgatgaccatgcccacctggttgcgctccaggatgtcgagcgcctgcagggcatccgccgccgagtagaccgtgtagccatgcatctccaggaagcgagagagcatggtgcacagctcgagatcgtcatcgacgacaaggatgttcacggggcgggccgtcacacatggacgggcgccggaacctaacagccgtgcccgtcgttgacaacgcacagcgtgccttcatatgtgccggcccatggggaagcggaccgcgaagcgagagggggtgggtggcgtggaggctcggctggatgcggtggcggacgctttcgaggccggggacttcgaggccgcgctggccggggcggagggcctgctggcggacgcgcccgagcttcccgaggccctccacttccgggcttcggccctggtggaattggggcggctggaggaggccgggaaggccttcgggcaggccctgaaggtggcgccggaggacctggaaatcctgctgagcgccgcggactgcctggtgtgccgcgccggggaggaccgggaggcggtggcggaggggctcgccctgtgcgcgcgaggccggcgcctggcccagaaggccgacgacgtggagatgctgtacgagttcctcctcctggagggcatggggctcaaccagatgggcgagtgcgccacggcgctggtgagcctggacgcggcgctcggccacatgccgcgctcgctggacgcgcaggtcgagcggggcatcgcgctgttcgagctgtgccgcttcgacgaggcgaaggccgctttcgagaaggtgctgaaggacgcgccggacgacccgtgggcgcaccactacctggggctcatcgccgagcggcgcggggacgagaaggaggcgaagcggcgcttcgacaaggcgcgggcgctggtgcccgaggagttccccccgccggtggagctggccgaggcggagttcgaccgcgcggtggaggacgcggtgaagtccctgccccgccacgcgaagcagtacctggacaacgtcaccatcgccgtggaggacctgccctcggacgaggatttgctggggcaggacccgccgctgtccccgagcatcctcggggtgttccgcggcacgcccgtgggcgagcggagcgtgatgaacgcgtatgagctccccgcgtccatcgtgctctaccagcgcaacctggagcgcttcgcgaggacgcgcgaggaactcatcgagcagattggaatcaccgtgatgcacgaggtcggtcacctcatggggctggatgaggacgacctgtggcagcgggggctggactgacgagcgaggcccgcgtggcttccagcgtctggcggatgccctcgctgtagggcgtcttgcgcacgctgcccagcagcttgtgcagcgccgagtcgtccatgaggacgggctcggtgagcaggtagtgcatctcgaccatctcgcgcatgaacgggttgaagaggccgatgaggcggagcatccccttccccgccgtcatgaacttcgcgaggtggccggcctgggcgtagatctcctcgacgagcttgcgctgtgaggtgacgccggcgccggcgaggttccaccagcggccgtaggcaccgggggcgtccatgagggccgtcacggtgggacccacgtcgggcacgtagacgtactcgtgcggcgggtcgatggggccgatgagctgggcgcgcttgccctgggcggcggcgacgaaggcggagtggaggaagctcttgtcgatgccggggccgtagaagtccgggaggcggaggatggtggcgcggagctttccggcggcgtccgcggcgaggaggatgtcctcctgctccttgcgcatgcggcccttgaaggtgtgcggctcgcgggggtggtcctcggtgacgggcgtggtgcgggggcggccgtacgggtacacggtgccgatgagcaccacgcgctcgacgccctcggcgatggcggcgtccacggtgcggcgcatgagctccgggtggagctggaagcgccagtagtccacgccgaccatgtagatgagcgtgcggatgccccgggcggcggcgcggatggtgtccggcgcgtcggggttccaggtggcgatctccgccttcgggtccgcgccgaactgcgactgaagcgaggcgcgcgagcggccaaccacccggtacgccctcccctgctcgcgaagagccttcacgatgctgtgtccgatggggcccgacgctccaaacaacgccaccttgtccgtatccatggtccgctccctgggttccgaacggcgagcgttttatgaacgtcgttcattgtgaacggtgttcatctactgctggccgttcaggacgtcaagccctacagtggggatatggggatttcggagcggaaggagcgccagcgggcggagctgcgcgagcagatcctccaggtggcgaaggacatggtgacgcgagagggctttggtgccctctcgatgcgcaagctggcggacgcggtggagtacgcgccggcgacgctctacctgcacttcgagaaccgggacgcgattgcccgggagctgtgcatccgggggttccaggacctgctggaggcgttcgagccggcggcatccgtggaggagccggtggagcggctgtaccggctgggcgaggcctacgtgaagttcgggctggagcagccggagacgtaccggctcatcttcatggaggacccgaagctgtcgacggcgctgttcagggacgcgccggaggacggcgcggggccgcggtccttcggggtgctggtgaaggtgttcgaggacctgaaggcggcggggaggattgccgaggacgccgagccctcgaagctggccgaggtgctgtgggccggggtgcacggcatcgtggcgctgcggctgacgtgtacgggcttcaagggctcgccgccggaggagctggcgcggctgttggtgtccacgatggtgaacggattgccggggttgaagcccgtgaaggcggcgcggaagacacggtgagccgggcgttggttgacggggcccgtggggtgcggcagtaatcgacggtggtagggcctccggacctggtggccggcccggtcttcaaaaccggtgaggggcgctgagaggcgtccctggtgagttcgattctcatgctctaccgccatgttttccttggggttttctgacgcggccctgatcgggttgcaggacgccccacccgcctgtacctctcgtacccaagttttacccaagtgaggggggtacgggagccgcgcatgacgaagtggagcgggaagtggatcggaggccgcacgtacacggccaccgacggaagcacgcgctggatcatccgcaagaccgtcgccggggtcgcgtacaacgtcacgctggacgtgcggagcgaggccgaggccctggctgagctggcggccttccgccgcaacccggccgcgtaccggaccgcgagccaggagcgccaagacgaggcccaacaggcccaggaggacgccgcgcaggcggtgttcctggacgaggatcgtgcccggcggttcctccagcatctgaagtccagcggcaggtccgacgagtacctgaagagcacgcgcagctacctggccgcgtgggcaacggcgctcgcggacaaggacctgcgcgcggtgaccggaccggcgttgaagaagatcctggccacctgggacaccggcaagaagtggaggatcatcgtcttcaagtccttcacctcgttccttcaggactcgggcgaactggacccgatggtgaaccccggacgcttcctgaaggtcccccctgcccgccggaaccacgaactcaagggctacagcatcgagcacgtccagcagctctacgcggccctcggctcgcaggccatccgcgatgtgctgtgccttcaggccaagaccgggatgcacggcaccgaggtggaccggctcgcgagcggtgacggcaagatcgcggtgctgaaggaccagggcgagatcgccgccaccgtcacgttcaagcacaagaccgggaagccgttcaccttgtcgctcgatgtgcaggggctcgccgccgcccagcgccttcaagcccggggttcagcgccggatcggcagaccatccgcgaggccgtggagcgcgtgtgcgcgcgcacgagcctggagttcgtccacttcggcgcgatccggcacagcttcgcaacgtggctggtcgagcagggcagcatctacaacccgaagggcggtggcctgtccctggaagccgtcgctcaggcgctcaaccacagcagtacgcggaccacggccctccactacgtcagcgccacagtgccgccgatgtacgtcgtccccatccgcctggagcattcgaatgatccatcggagttgcgcatagctcgggcacctgcggggtgaggctcatgaaccagagagttcggagatcagtacgaggaggttcgttgatgcgtcaggccccaggccggagccttcaacgttcttattgcgccgaacgctccaggtgattaccgcacgcctcccacaaaggagccattcgatgcagatcctggccgtaaccgaacctcctagtttcggggggaagtgcaccatcaccgacgtggcgggcaacgttgtcgggtacctccacctgcgcgtgtcctcgatgctcaacggcagtgcaggagtcgtaaccgatctccatggccgcgccctcatgcaggcgcccttcaactttggggtgtgggatctagaaacgcgacggagggtcgcgatcgcgttcgtcgaggcggccttcccggagactcgcgccgcaattgccggagccaagccgaccagagcccccatcacggttgcggagttcggaggcgtgctgcgctcgctgctcccttccacgcccactcaccccgtcgggactattcccgcgtccattccgatcgacgccatcaacatcgttgcggcggacctgtacccgaaccggacctgcgatagggagcacttggaagagttgacgaaggtgctcaacacggagttggaggcgcagtaccgcacgcgcctggagtggtcaggagacacgctgcacctgcgcgccaagtagaccatcggcccctcgggcgcggccagcaaagtctcttccttgatcgaggagtaggatgcggcgaactacgcctcgatcactgccggatcattcttgtcacgatgtcggggggttagagcgtgtcgatccggctgcggatgccaggacaagaagttctgcctcctctatcccgttgggccatgtcgaggggcaccaaaaccctcgctcgtgagcttcggccgcttcgttacggcgactttcaacgaggctcaaatcgtgagcttgcggatggcaacacctgggttcggatacgctccggctgcggttccctcctgcttcccacgccgctccttggtgcggactcgttcaggctgcttggtttgttgaggccgattgcctcccttccgaggggcgccctccgcgagcagtgcctcgatgctcgccaccgtgatcatcacggaccgtccgatcttcggtgcccgctccaaccggccttgctccaggagcttgaagacctgtgaccgcttgcagccgagcattgccgacgcgcgctccagcatcacagccgaggcgttctgtgtgaccgattgagcgcgaagcgcacgaacctcgcgcttgatctcggccagttcctggaggatggcgcattccacgggtgcgggctcgtggtcctcaatgggcacggcaggtcgaaagactggaatgggaataggaatgaggtccaacggtggctccggccgagcaagcaaggagcctgtacggatatagctgaagttctcgatcatggacttgtactcaaccggtctccgtcggaggccgtggatggtgtcgaaggtgtggatcgagccggtggccaccagtccgtccctattctgaatgtatcgaatctctccgaggtccttccgggcgctcgccctgcccgcctccgtgccggtgaaggcgaacgggaggcgcttggcccggcacctgagccccgttggacgccatggatggcccggaagggtcacagcaccggctacttcagccctttactcgtgctgcggcgtcatcgtcctgacttccccatagccttccatcccttccgatccttccacctctctctgcaaccagggggagaccgaagcagacagcatggaaggcatcgccgcagtcggaacgcatccgttccaatcacgggtgcgcaaggtccatccgagcgccagcggcgatgctctccatcaccccgtcgatctcggtctcccagcgtttcaccgtgacccggtacttgattccatcgctccgcttccagcccgtgttctcttcaccggccaactccttcatgcgttcaccgaacttcgtgagcgagaacgccatccggtcacggccctggtacttcaagtcctcgacgtagtggccgtacagcgccgtggccttgatccactggtcccgctgcgcgcaccggcgctcgaagaaatcttccaccgagtccttggctcgaatctcatcctggcgggcctggacctgcgccaattggccgaggagcgggctctccgccttctcgtccacgctcgtccacatggccaggaagtcgatctgctccagtgccgtccagttcatctggggcagacagtccagttgatagaagcgtcgcattcccgtgggatcgacgacgatctccttcacctgcttgttggacgcaccgatgaaggtggcgttgttggtgccggtctggagcttctggacaccgagcacccggtactcgatccgctcggcggtgatgcggttcttgagcacgtcagacgctacccgctctgccttcgccatttcgtcgaagaacatgccgtagcagcgagtcaaccggaactgctggcgctcatcggtcaggaactggagatcggcggggaacccaacgagatcgccaagaggctgtagcaggctcttgatggccgtagtcttcccgccccgctgtttgccgacgaagatcggcatcaggtggtccttgaccggcttcccgaacaacttccgcttcacctgccaaatgaagtgaagaacgaccacgagatctaccgggtcaaggcgtcccgtggttgctcgaatgaactcctcggcgtcacctcggcgtccgtcctcgcggaacttcaacttctcacgatactgctcgacgatcccccggcgttggtccgcctcccacaggcgcacggcgttaccgagatttcgcacgctgatgcatgtgcgctcgttcgtggactcgatctcgatctgggacaagaactcggacgcaggaaacatccggcccccaatctggaagccatcgctcgcgtacacgaatgtgacgccgttcttctccatccagtgttgaacccatgtgcgcggctcgaagcggttctcgaccctcggcaacgcctgcaccaatcggtcgatgacctcgggcttgcagaccttcttcctcttcaaggtcccgacccacttcttgaagatgccatgctcggtggagaaccaaaccgagcaccagacgagagcgcgcttgatctcgatctccttcaccccaccgtgcgcctcatgctgttccacgagccagtcacagagtgccgaaggaagcgccgggcgcgcagaggccaagtactgcacgatcaggaactgacgagcccatgcttccgtcttgtggtgatgagcggcaagcaacttcttcatctcgcgatgcacccaatcatccacaccggatttctcgtgctgtgggtcgtggtccacgtacggaatctgagggtcacatccgcgcgcagaaaggcccttcgcgatccgcacaacttcacgaacgacgttcatgttcgtgccgtccatgtccggcgcatcgccgcagacgaacaccgtgcggccctgtgcaaggtatgatgcggcctcggggtgcggtacccactcgtccgtcaggtcatcccagcttcgtcgccgggcctcaacatcatgggccatgctgatgccggggagccccagcgccggggtgccttcctgcgcgagcagcgccgccttcttctcgccctcaatgagcgccatggggacttcttcgtcttgaagcatcgggcagaggatcgcggtgtcgaagatctggggcgcgtacccgaaaggagcctcgtacttcttcaccttcgctggctccccttcgacctcatcctgggtgtacgggcgcaggatgtggtccgtgaaggtcgcggttgggagggtgagctgcgcctccttcggccggagcacgcgcgggcgatgcggcttgaccttggcgtagttgagccccgggtacacgagcaccagccctccagcgtcccccttccattcctcgggccagttcaacaacttccggttgttctcgtccgtgtccgttcgccaaccgagtttccgcaccgtcgagggcaggaggcaggacttcttcaggtcctcgcagtctcgcgccgagatcggaagctcgttccactcagcctcgttgcggctggattcaacctcgttcgccttcgagtcgggcagtgccttgtccgagtcctcatgtcccattgggtacacctctcccatcaacgccgaagccgtgcttcgacgccttgaaatgcagggtggctcttgaacttgtatcgattctggctacgtcgttgcggcgccctggagcggagccgggttcggtgtggctacaaggaatatatcgaatgtgtctgcgcacctcggacggtgcgccccgagggccacgggcatcaacgccgctgcgcgatcctgcgccgtggacggccaggggattcgcgacgtacaccggacggcaaccttccgtgtatgagccgaggcacccgctggagcacggagtacctggacgcgatgctcgcggcctgggagaggtccgggctgacctcggagcagttcacggccacggccgcgccagggctgcctgcgcgtaccctacggctgcaccgccagcgaaaagagaaggagatccacgcagagcttcagcggcttcgggatgaaaacgcgacgctccggtcgatgctcgaaaggagcgcgttggtccctggtggttgccgggcggcaaccgtcagcgaccccaacggccacggcattggagatcgccatgtggcaaacggaaccgaagccccttcgccgaccgcgaccggcccgccagcattggagccggtacagccgcgcgtggtgccgcaggaccaggttgccggaccctcccccggtgatcacgatggtcgtgtgctcgtaggggaaatcaccgagccggtgcccccgaagagaccggcgttctcctgggattgatggcctcgcgcctgctggccgatgtcggacgccatctaccgctggtcttggtccgcgagcgccttcaagagcttcttgatctcggccgaggacatcgtgcggatgcggtccacgaggcgttgccgctcgtcatcctcgggaaacgtcaggagatccagcggcaacactcccaggtggtccgccagcaccttcaacgtgcgaaggccaagctcctgcggccagtgcttagaggtgggactcagggcacggagcagaggcagagcgcgagcaccaggcaggcgctccgccgcgctcaccctgccgagccctgtggtcgcttgtaataccctttgggtttatgaatagtagacctcggaccgcgagagccaccggccccgtccccctcagccgaggccccaccagggagccggaaggcccgagccagtgcccgccgcgcgtcccttcccacctggaggccgcacatgaccgatgacagcacgccgaccgacgaaacgcagatcgaggccccgacgccggagaacacctccgacctgaagggcgcccgcccccgactccggttcaccatcgagaccaccacgtacgagaccctccgcacgctggagcggcggggtaacggcgaggtggtgctcctggccgagcgtcacctcccccatggactcgccgggctcgtcaccatcaagcgcctgcgcaatcccgtcactttcgagcgctgccagcggctgatcgaggaggtccagctctccttccgcctccaccacccggccatcgcccaggtccatcacctgaaaatccatgccgaccggccgcacgtcatcgccgagtacgtggacggccccacgctggacaccatcatcagcctcgccaccatgcgcgagaagccgctctccgcgcccttcgccctctacatcgccgccgaggtggccgacgccctccaccacgcgcacacgctgagagattcggagaaccggccgctgggcatcatccaccgcgacgtggcgccccggaacatccgcgtggcccgcagcggcgaggtgaaggtgacggacttcggcgctacctactcgctcatggtgggcagggaggagacgccgggcctcctgctcaagggcgacgtggcgtacgcctcgcccgagtacctgaaccgtaagcccatggatggccggtccgacatcttctcgctgggcctcgtcctcatggagatgctgacgtgcaagcacctcttcgacgtggaggacgaaaaggcccccaacgccaccgtggacgtgaagacggaggagacgccctcggtgcccctcacgcagatgatcgcgctcgtcaaccgctaccgccccgaggacgtggagaacgcgatggcgggcctgccggacgcgctcaaggccatcgtccacaaggccctccagcgaaagctctccgagcgctacgccacggccgccgagatgcgcgatgcgctgcgagcggcgctcgcggcggagtcacagcccttcggccggaaggaggcgagcgaggagctggcgcggatgctgtcggaggcgtccgtcctgcgcgaccgggtggaactggacgaagaaggcatcttccccgagggcctggacgccgacgagccgacgcccgcaccgaacgaagagtgagaacgggcggcggtgcattccttgaagcaagcgggccccggtgtgggcccgcgtcgtttcagcgcaacaacacctgggccaccttcacgagggcatcgagctggtcctcgtccatcttgcgcgccagtccggtgagctggcgcagcttgggcgccccgccctgccctcgctcccccttgcccgacttcgtcccctcctccgcgtccgcgatccccagcaactcgtccgaggagatgcgcagcaccgagcacatccgcagcagcgtctggacgctgggcagcatcttcccgcgctccaggcggctgtagaccatgtgcgcgaggcccagcttctcggccacctccgcctgcgtgagcccgagctgcgtccgggcctcacgggcggcacttccaatacgggtcgccagctcttcattcatgcgtcggggtaccaggacaccgagaaccaggtttggcgcgggcaggaaggcccaagcctcggggacgccccttcctgccgcatctcggcggccatgtcgatccacgagcagggccccgtcacgcggcgcccctattggccggacccatcgggggcgggaacctccagggccaggccgcccaggatgaagtccacggggacacggaggacaccgcacaggcccaccagcgtggggaggctgggcagcaaccggccacgctccaggcggctgaacaccagcgtcggcacgtggatggcctcggccacctgggcctgcgacaggcccgcccgatgccgggcggcgcggacattggttccgatctgctgggagagcttcgcgtacatgaggagacctgggagaaagaggagaatgccgcgtgggcggcactccgagcatacagctcaccaggttcaacgatagtatccgctcaaggtttacccttctcccgcgccacttcgcggggggaactcgtacgagatccgctaccggttgagagcatgtccaggaacgccgaccccacacgccccgccgaaggagaggacacttgagcccgcgtctgcatcccgtcgtccccccgggcacggacatcggcgggtacctggtggaggagaagctgggagccgggggcttcggtgccgtgtaccgcgcccggcgtggagggcggctctacgcgctcaagctcatcccactctgggggctggctgagtgggccgagcgcgaagtggccatcctcctccggctcaagcactccaatctggtgcgcatccgtgggcatggacagtggccggatgaggcgcctcaatccttcttcatcgtcatggactacgtggaagggcgccggttggacgtatgggccagagaggagaacccctcggcccgagaagtcgtgctcaaggtgcgtggcgtggcgcgcgggctgggcgccgcgcaccgggcgaaggtggtgcatcgagacctgaaggagagcaacgtcatcgagcgcacctccgacggagaggcagtggtggtggacttcggcgcgggcgggtacgagagcgcccccagcatcaccggcggcgtgctgccaccgggcacgccggagtaccgcgcgcccgaggcctggcgcttccagcaggagcacggggacgagcgtggccactcctaccagcccggcccctcggatgacctgtactcgctgggcgtcgttctctattggctcctgacgggcaggcagcccttcctcccggacgaggccgcaggggtggaggccgtgctcaaccgcgcccccaaaccaccccatgtgctcaatccacgcgtccccgaggccctgagtgccgtgtgcatgcgcctgctggccaaggagcccgaggagcgccacccggacgccgacgcgctgtgcgcggagctggaggccctgctggcccaggcggacgagtcctgggacgtgaaactctgcgacgcctatggcccggacaccgccaccacgctcgcggcggtgccgcacgcgggcgaagacgagctggtgcaatggctgaagaagcgcaaggcccggcctcgtcgggggccacgtccgccacacggcgagggcgcacacgagccggactcaaacgcggtggccatccaggcagagctgccacccccagttcctgctcgccccggccccatgccctcgccgcccccggcacaagccggtcacttcaaggccctgcgtgtggcgacctggatgggtctgctggtggtcttgagcgcgggcgcgctggtgatcgcgcgcaccttggcgccttcccctgctcctgccgcacgtcacgccctggagcctcaccccagtgatgccgtggactcaccacctgcatcccccgagttcgacctcgcgccctgggcccccggccaggaagtggcggcgccatggatggcaccggaagctcaggaagccgcagccgcgctcgatagcgcgcccaccctagcggccgtcgccctccccgcgacgatctccgaggagaaggcttccgtgaagatgaagaagaacaccggcgtattctccgagcccgagccgcagcgcttccggggcggaaccgttggcaaggcgctcggcctcggtgtcgcgggctgcctagcgatggcctgccctggcccccaggtccgcccgacgcctccgccagaggcgtgcccgccaggtgctgtcgaggccatgagcaggcttcgaattgagtatgacgaggatgtggtagccaccttcttcgcgaccgccgaggagggggttagcaggaacatcacggtgcgcgcgggcccgacaacggttcacctggggagaccattgggaaatctaccggcccggaccacgctctccggacgcctcatcatcggagaggatcgcgtttacggccgactaactgaagcacgcacgccaaagggtgaccgcttccctgtatgcatgcagatcattgagaacgactctattgggttcaagaaggagatcaacgacggctccaacagcgcctcggtctatccctattttgacgtgaaggccgtccgccgcttcgagtgaaccccgaccaggagcaacatggggctgaaccaagtatcaatgcagggttccactctgctacttcaaggtctccgcgcatgcccatgtcacccatcgttgttctcctggtgatagcgcttttctccggggcagccgccgcgcaatcgcgtccagcagccacgggcttgggggtacgccggattgagttctcggccgagaacttcgaggcaatgacgacaccggaggtacagataagcccgggggtttccaccacgttcgagttcaactccgccctccttcaggagaaggtcgcggttgaaggcgccgaccgcttctcgctcgtggacattggacgaagcactctccggctggtgccgtcggagcaagtcctgcccggcgaacgcctgcgagtgacggtgcggttcctggacggagcagcgccggtaggcatggcattcatcctcgtcgcgcaccccgctcaggcggagcgcttggtcgaggtgtggcgcaaccagcgcacggtggagtcctatcaacaggaatcgaaagaagcccgagcggaggcccaaaggtgtcacgaagagaacgagcgcctgcgcgccgagtatgcgggaccgggcggcctcgctggcctccttgcgaaccgcgtgatcggcaagtcgggcgtttcggtcaagcccctcgacttcgagaaggaagtccgccagcgtcctggagacgcgatcaggattcttcgtgcatggagctaccgctccgccaaccgcgtgtccgtgctcatggatttggactacccagaagccgcgcaacgctggatcgcgcagggagcatcgttggtgagcaagacaggtgaaacgctgagcatgctccctgtatggcaggaagcgcccgttgccaatgcccggatccggcgcctcgtggtggaagcagaggctgagccggacgcggcccaggacacgttcaccctcaaactgtgggaatcgaacgggctgcgcacgatcaccctatccggggtgacattcccataatgttgagaacatcctcactatcaagctagcacccacatagcatgaagtccgcgcccgtgcgtgtcatgggccgttcaaacacctgaaaaccaataactacatccttacaccatccaaaccaagccccatgtctacagccgagcaaacgaagaaaataatcaagaagctgcgagccaccctaaacgaaggaagctcagaaaagattcaagcactcatccagtccatcagactggagaatccatctcagtggctgaatttgatcgccctcgcactgggccccatagatcctaggaatccaacattcttcgaaaaagtatccgcaataaacagattggcagaagatcttgcgccagaagagcagcacacgctacgcggatacgaaagcatcgcaagggccatgcagatcgtatcgcaagagtccgacaaatcagaattctggaaatcttcgcgcctcacaatgatgtggcgcctatttacgtacgttgaatcccaatacatatttgttagcaatacgattcgaaagaagctcaagcgggccccaccgggctcgccatttgtcatggcgagcccttcaatcgcggttccaggaaccgatgggaccgcaacgacaagtgtcgatcttgtttttgaatctaccgccgaagccgccgaactaatactccgcatctccatgcacaggatcgacacccaacccccaaatgaaaagtttaccccccagaccccttatgacgatcctgactttggcaggctcctcgcttgcgcacacgcgtggcatcgattcagcctgctatggaaccaaatccagtataccgactggcgacctgagcatgatccacgcggcttcatctggacaccaaaaaacaaggcgcaatacctccaaagcgaaatcggaaacattcgcgagcgcctatttttgcagcaagcaatgctgtctgatggactcggtcctggggcagaactggagagtagaagagaagtcctggaacgcctcaagaggagcttcaatctcccgaagccagggaaaacatgggaccttaagattgatattaaagccctgcgagatctcctcggtcttgatcgatatgccacggctcgcaagatctacatgtcgcgtcgattcctaaccccagtaatgggagcgccagcagatcctgaactggagaagtcacagaaggagttgaagttgaacttcacgctgcatgaactcgccatggctctgctgcaaaggaatcacgcaacattcaagaccaagtcagcaatacacaacattgtttttgcagtcaccaagcagcgcctatgcaaggtaatcagcgaggcgtcgggcatcgaattcgaattctgcttttcccatatcaacaacatcgtcttcgacgcacagagaaaaaacctagagatctgggaccagccgctcgtaccagtagatgaccatagggtgttgttcgttccttcgatcattgccaattcccatcctattcgcacaatagagcatttagcttcagctcgctcaagctccgcgtttgactcccggggagagtattatgagcagatgattcaatcgaggcttgaggaattaacacaagcagtcgctgtgcggggcatcaaatttcctgcttcagatgggcggcagatcgaatacgacttggtgctttattggcaagggcacctatttatcttcgagcttaagtgcctgaagatgacaacaactcctgtggatgagttcggggcgagggaggagatcgagcgcgccgagcaccaattggtacggcgtgtttctattgccgaaactgactggaaggagttcaggagccaagcacagggagtttcactccccgagactccgccagcgcgcagaaacatccatgccataatactgaccaacatcatgaactttacgggccgaagaactggagagatcgtgacggcagacgactcctgcctgtttagatacttcgacagccctcatgttcccgtatttgatgctgccacgggtgccgaaatctcaagcattgcacgtttgcgccttcgcaacgaggggccgccatctgcttcggggctttggcaatatttatcaagccctccgcagttggagtggatgcggaagcaaattcggcctgaataccacccactgccaccgctggatgagggcaactatcactggaagctcatggtcgcattcgatccggccgacgcccagacgactaaatagtgttggtttggtctcgttgcgaaggtgagcattgacctcggctggacgctggattcagcgtctacaacaacgatattgcagggtgaggcggaggctgcgtagccttcgtttagaacccgtggagaacccgacccatgacgctatacgaactgtttgaagccgatgatgaccgcgatgtccccgccgactttccttggctcttgatcgagatccctgaggagcaactccgccatgcggcgcttctcctgaatgagggtgagtggcgaccctcgcacatttctggcatctggtatcgggtggatcccgagcgcccagctcagaagcagcagcggcacgtccacgtcgccgcgaagaagcacatcaagatccccacgaagcaggcttcatggaacagagacaccacccgccatgaccgcaagacattcaatgcgaagctgggctcgcaagggagctatcaagacgtggcgaagacggcgctgggcctgccgcccgaggctgtcctcgaacacgttgtggaaaatccggccgaacaacagatgctgctcaccgaatccactgatccccagttgaaaactgagttctacaggtggttggaggcccagcccaggcggtctaacttcgaagcgctcgtcgaggacgcggttaggctcaatctgccgctcgacctggaatcgtaaggcagtggttaaatgcggtgatacgagcggtgatacgagcgcctaacaaaactggcatagggacccggcttctcaaggacgcagctgcaaccaaggcgattttgtaggcattctttggggcccgagacagcgcgcgggatctccggcacccagttcacggacgtcaccgtccccggtgcagccaatggcccctgacccctgccgtccccaccctcgtacccaagctgtacccaagatgaacggacgcgggtggacctccatggacgctccacccaccccgctccagagggaaaccggccgaccctcaatccctccgggcacctcgcggatcgggggagcggggcttcaaaaccggtgaggggcgctgagaggcgtccctggtgagttcgattctcatggggcgacgtgaacccggccgtgctccatgcgctccacaacgcggcggaagatgaggtcgataatggcgagggactgagccttcaggagtggccggaacagaccagggccacgtcagaagcgaacgacctccctttcgtaaccgaataacgaaacagaggcgaggatcacaactttcgaaatccgttgacgcccgtgggcttcatttcaggaatcctgggaaatgcctctccttgctcttcttgggcttctccatggtagcgcttcgcgcacccaggctctggtactatccatcatatggagcgctccctcggaacgacagagcaggtcttctataaggtacggcagaagcgccccttcaacatcgtcattacgggcaagctgcgaggacgcgtggaggagcaggctgtgcgccaggggttggtggccctgcaacggcgacacccgctgctccgagcgaagatcgtcgcgggtactccgccacgcttcacctcgcaaggtgtgccccccattgcgctggaagtggtggaacgcaaggcagaggagtcctggcaacagcatgtcgaggcagagcttgacaggcctttcaactcggaccctgggccgctcgtccgcttcatcctcgtgcggggcgagcaccgctccgagctgctgtgcagctatgatcatctgatcggagacgcgcactccggcatcttcgccctgcgcgatctgctgcaggtcatggcctcccaggaccagcacctgcccgagctcgccccaaggcccgcctatgaggagctgattgggccgatggtaccgggcacccgactgcttggcgccgccgtgcgccggggctcctcggcgctgctgcgcttgtctccgaccctcaatacgctcacagagcggctcgtcgcaccgcggggcatggctcgcagcagcgccgagggacaggcgctctacagccaccgaattctggagcccgagcagctcgcgcggctgcttgcgcgctgtcgagagcaagggtcctccgtccacgcagcgctcggggccgcgctgctgatagctcgggccgagtcgcagggtgccaagaagcgggtgacgctcaccctcacctctgcgttggatgctcgggagcgctttggcgtgggtgaggacttcggcctgttcaccacggggaagacggacttcttccgcgcgcgcggcagcaccccattctgggagctggcgcacagactccgatcgcctctgcaggcagcacggaagaagcggagccacttgaggctgttccgcctgatcctggagatatccgcgctcaccgtggacatctcctcccagccctggatggaacgcgcgacacggctgggcctgcactccatgctcgccctgagcaacgtggggcgtgtggagattgccgcccgctatgggaacctgacgctcgagggccttggcttcacggggacgaccgcggcccagttcgacgtggtgctgacggcgatcacctttgcccagcggttggaggccagctttctcttcaacaccgcgcacatgcagcgcgagcaggtggagcagctcgcctcgcgcacctgggagctgctggccgaggcgacgcgctgagcggctactccggctggatgttgtacatccgcttgacctcttccagcggcagctccatgaccttccagggatcccagtctccgaagaggtccacgctcatcgcgctgcctcgctccaccgcacgccgcagctggggaatgggaagcgcctcggcgagcaggcgaacgggcaccaaggacttgtactgggccggatcatagttgcgggtgcgggggccgaacatgaagcccaggctgaaggccgtggtcagcatttcctcccagatggagatgccatagccggagagcaggtggacgaagtcatgcacggccgagtgcacgggcagggcgtgagggtgacccggcagcggcacgccatgggagtggcagtacttccagaactcgcggccaaaggaaccctcgggcaggtgctcgagctgctgaaagcgttgcttgaggtctggcgcctcattgcgctcgcgcagcatgtcatagagcttccagggcagctcgcccttcggcagccccaacatgcggcagaagtactcaatataggcaggcacgaggaaggcggtcagtccaacggacagccacagcttggagcgcgcgtccgcggccagggaacgctcgcgcggtccaggggctcgctggtacttccgcagaaatacatccgtgagtattctcattcgaacaccttggctcgttatacggctggggcagctttcaggcaggtcgctgtctcctggagaaagccatacggatccttggggtcctcggccatggactccacctggagcaggcggcctacccccagccgctcggcgtgcgccaggatgacttccagcaccaccttgtcctccaaggaaaacccggtggagtcgaagacggtgaggccatcgcggtgagagcgccactgctcgggagagcgggtcagttcaaagaggctggggccaatctctccaggctcgagctgctggcactccccctccaccacggcctgggggagatagtccgggcataccagggcgcgacgcagcatctccaggggcagctctgtcttgccgggcagatctgagcccacggcgttgatatggaggtgggccttgatcagacgcccggacaccaccggccccgcgcccacggcgacggaggtggccgtgcagaggatgtctgcctcctgctccacgcgcgtcagggggaccgccaccacctccaggcccaggaaggccacacgccgggcaaagcttcgcatggcttcgggagcaatgtcgtgcaccagcacccgtcccagaggaaagacgcgcgagagcgcatgtgcctgggtgacggcctgagcgccacaccctaccaggcccaatacccggctgtcctcccgcgcgagcagccgactcgccacggcggaggccgccccggtgcgtagcgcggtaggaaaggtgccatcacaaacggcccgcaggtgcccggtcgtcacatcatacagactgagggaggaaagaatggtgggcaagcccagctcctccgggctgcgggggttgtagcccaccagcttgatcacggcgtggcgccccacctgcatgacgggcatccactccaacacgccggggtgggggtgctgatactggaagccctcgcgcttgcgcagctcggtgttggcggggtcgaagtgctccagctcgtactcgagggtggagatgacctcatccatcagcgcgtgcagccccgttgcacggacgatctggcgcagttcctgctcacccaggatccttgtcatccgcatggctgaccccgcccctttcagctgcatgacaggcctcactgcattcacggctccagttcagggccgggcaaaatctatcttcaacatccccttgtccaggaccgcgtccacggcatccagctgcgccaccgagcgcggcagcatgacgtggcggcggaagccgcccacgcggatgatgaggtcattgccctggcgatccaggacaatgtctccgcggtcggcacctggcatgaggagctgcagccgatagcggccctcgtgctgcttggcgaactgatagggctgcccggagatgtagcgctcggtggggtccgagtccccgtagagccgctgcgccagatcctccaaccgctccagccccaccacctcgtgctccagcagcgggagcctggccaccggcatgggggagaagtactcctggatgtgatccaggtaggcagattgagacttgtgccactgagcaaagtattccgtgtccggcagcagacgattgaccacgacctggtccaccgtcatgccatacatgttgaagtagaggtaggcccgctgtgtctcgcggatgaccattttttccgcgctggagaccaatcgcaccgtggtgcgattgccatccgtgagcaacccttcaatgcccttgacgcgatcgaagagctgctcgagggaggcaaagtagctgtcctccggcagatcatagctcgtgagccgactggccaggggccgggccagcttgacgagcgtgcgatccacattgaagcgccggcggatataccactgcagcacgctggtgatgttgacgaagcgcagcgactcgcccgtgggcggacagtccacgatgatcacgtcatagcgcccctgctgcacgtactggttcaggtagatgagcgagatgacgtcctccgtgcccgggagaatggcgacctcctcggccaccatgttggataccccggtggaggtcagcagcacggacatgtagttatagacttcactccactgccgctggagttcgtgctggatgtcgatctcttgcagttcaaggttgggggcgaccttctggggcagtccctcgttgaagtcgaagagcttgcgatcgagatcgaagctgtccgagaggctgtgggcaatgtcgaaggacatcaccaaggtgcggtagccgcgcttggcagcggccaccgcggtggccgcggatgccgtcgtcttgcctaccccacccttgccagagaaaagaagaattcttgtcatggatgccccgcgtgcctgccggcaacgggccgccatggcgctctccccctccatgggtcacctgttgcgtctgtggaactcatcactatcagcgacatgccagaaggagcaagctggacggtggcttgacttggtatgacgctggacagtaggtatgccaatagaggtggggggctttatgaaatcgatggattggctatcgggcacagcccccccccttgttcaattccaggaggggtgcaattgacagccacagcgactgccgagcacgcgctgaaagccctccgggccaagggactcgccacgtcggacgaggcgctgcccgcggtgcggcacgccagcggcgaaaaggctcccctctcatcctcacagcggcgcatgtggttcctggagcagctcgagccaggcaacgcggcccagcatttgttgcaaagtcatcacatacaggggcctttgcaggtagaggggttgcggcgggcgttggggctcatggtcaagcgccatgaggcgctccggctggtggttgccattggcgcggcgggccctgagcagcgtgtgcggcccgagtggtggcccgagctgcctctcagcgatctgagcggggtcgcccaggcggacagggctcgggccctggcggagctggcgcgcgtggaggctgcggcgcccttcaacctgcagcaaggcccactgttccgagtccggctggcgcgactggcggaaacggagcatgtgctgctggtcaccctgcatcacctgatctcggatggagcctggagctgcgaggtgctcatcaaagagctggcgatgctctacggccagcacgtggaaggctcgagcccggagctggcgccactgcccgtccaatacagggactacgctggctgggaggcaagcttcgcgcccgcgggagaggccttggaggcctggtggcggcagcggctcgccggggtgcccacggtgctggagctgcccacggagggagcgcgtcccctcagacagacgtaccgggcagggcgggtggccatcaccgtgcagccgcgcctgcgccaggcgctggaggacctggcgcacaaggagggcgtgtcactctttgccctgctgctcaccgccttcaccacgctgctacaccgctactctcgccaggaggaattggtggtggggtggcccgccccgcagcgcccccggcccgagctgcatggcctcattggatacttcggcaccccggtggcattgcgctcgcggctggagcctcacacccgggtgcgggaggcgctgcggcagctcgatcaggaggtgcgtgaggccaacgcccatgcggcgctccccttcgagcggctggtgagcctgctagacattgcccgcagccccagccgccacccgctgttccaggtgctgttcgacctgctgccggagcagccccagcctaccgctggcggctgcgccttccggccctgggagtccttcaccggcctggtggcgtatgatctcactctgctgctggagccgcgcggtgaggggctggagggggcgctggactacagcgcggacctgttcagcgaggcgcgcatgcagcgcgccgccactcagtacctgcacctgctggagcagctcgtggagcggcctcacgagaggctctcgcggctggcgctcctcacgcctggtgagcacgaggctttgctggcggggcacggcctgggcgggcccgtggagggcgcgcaggtgctggcccaccaccgcttcgagcaccaggtgcggctcaccccccatcaccccgcgttgtgcttcggcccgcaggtgctctcctacgagcagctcaaccgccgcgccaacccgctcgcccaccggctgcggcgcctgggcgcgggcccggacaccctggtagggctgtgcgtggagcgctccctggagctgccggtggcactgctggccatatggaaggccggggccggcttccttccgctggacgtcaatcagccccgcgagcggctcgccttcctcctgggagatgcgagctgccgcatcctcctcacccaggagcacctgctccagcgcctgccccccacgaacgccgcgctcctgtgtctggagagggaggcggaggcactggagcgcgagccccaggaggatgcgccacacgaggccgggctcgacaacctggcctacgtcatccacacctctggctccacgggcacgcccaagggcatcgcgatggtgcatcgctgtctggccaacctggtggcctggcagctcacccatgagcggctgggtggcccctcacgcacgctccagttcgcctcgctcaacttcgacatctgctaccaggaactcttcaccacctgggccgctgggggcaccgtggtcatggtgacggaagaggtgcgcagggatcctgcccggctgctggaagtgctggagcaggagcaggtgagccggctgtacctgcccttcatcgccctgcagcagctcgcgcgggtggcggatgagcgcggcgcggcccctcgccacctgcgccagctcattaccgccggggagcaactccaggcgacccccgagttgcagcggctgctctcgcggatgccggagtgcaccctccacaaccagtacggcccctccgagtgccacgtggtgacgagccatgacctgacacgcgagccgagccgttggccacggctgccgcccgtaggccggccactggcccacctccgggtgctgttgctggacggggagcagcagctcgtgcctccgggtgtggccggagaggtgttcctgggcggccccgccctggcgcgcggctacctgggacgtccggagcagacggctgatcgcttcgtgcccgatccattctcccgcgagcctggagcccggctctaccgcaccggggacctggcgcgcctccgagaggacggagcgctggagttcctgcaacggatggacgcgcaggtgaagatccggggctaccgcatcgagcctggggagatcgaggtggtgctgtgcgagcaccccgccgtgcaccaagcgcacgtgcggccctacgtggacagcgccggagagcggcgcctggtggcctacgtggccgcacggctcgaggacacggacggggcggagacagagcacgtggagcgctggcgcgcggtgtgggatgagacctatggcggcccaagcggcacggcctttgacctggccgggtggaatgacagcgtgcgcggcgagccgctgcctccggagcagatgcgagagtgggtggagacgacagtggagcggctcatggagctcgttccccggcgggtgctggagctgggctgtggctccgggctcctgctccgccggctcgccccccgctgcgagtcctactggggcacggagctctccccggtagccgtcgagcggctgagggagcaactccagacgggcggctccccgctcgcgcagcgcgtgcggctcatggcccagccggcggatgacttctccgggcttccggaagccggcttcgacaccgtcatcctcaactcggtgacgcagctcttccccagcgtggactacctgctgcgggtcgtggagggcgcgctgcgcgtgctccaaccgggcggaaccctgttcattggcgacgtgcagaatctgcggctcttcgagctgttccatgcctcggtggccctggagcaggcgtcagcggacctggaggcgccagcgctgctcgcccgcacccgccagcgcatgctgctggacgaacggttgtacgtggacccggacttcttcgccgcgctcgccacgcactttccccagctgggcgcggtccggctgcacctcaagcgcgggagcgggaggaacgagatgaaccgcttccgctacgacgtggagctgcagctcgcccccgtagcgaaagcaggccccgcgcaagagctgccagagctggactggaggcatgaggggctcggcctggaaaggctggagcgcatgctggcggagcgaccggcggggctggtgctgcgcaatgtggccaacgcccgcacggcggacgaggcggcacggctggcgctgctgcggactggcaacagcgtgggccggctgcgggcactgccggcggtgacatcctggaatccagagcagctctggaggctggcggaggcagccgactacacgtgccacgtcacctggagcgcccaggacgaggaaggccgtttcgacgcgctgctcatggcccgcgcggctggctcctcgcgcccggcggcctggctgacgcctcccccgcctccccctcgaccctggaagagctacgccaaccagcccctggcggccagccgccggcgcaccctcgtgggagtgctgcgaagccacctcgagcacaagctgcccgagtacatggtgccctcttccttcgtgctgctggacgcgctgccgctcaagcccaccggcaagttggaggtggcggcactgcctccccccgagcccgcacaagccgagcaaacgccaggccacctcgcgccgcggacccccaccgagcgccggcttgccgagctgtggcggcgcgtgctcggcgtgcatcgcgtgggggtggaggacaacttcttccagctggggggccactcgcttctggccacacggctcttgtcgctcatccgcggagagctggggctggagctgcccctgcgggtgctcttcgagcagcccaccctggcggccatggcgggttgtctcgaggctcagagctggagcacccaggctccccaccctccctctgcctccatcgaggagggagaactttgagcgccggagcgttgctcgcccacgccgcgagcctgggtgtacgcctgtgggtagagggcgagcgactgcgcttccaggctcccccaggggtgatgacgcccgagctgcagtcccgcctgggaggcgctcgccatgagctcatcgcactgctacggcagctccagccctcctctcagggaggcagcctcctggccccagtggctcgaaacgggcggctggcgctctccttcgcccagcagcggctgtggttccaggagcagctccaccctgaggccccggccaacaacctcacgggggccgtggtgttcaccggcccgctgcacgtggccgcgctgctcggggcggtggctgcgctggtgaggcgacacgaagcgctgcgcaccaccctgggcgaggagggcggagtcccctattcgctcatcggcgagccgtggcagccggcgctggaggtggaagcgctaccgggtgccaccgtgggcgagcggctggagcaggcccgagaggtggccctggccgagtcccggcgccgcttcgccctggagacggagccccacctgcgcgtgcgcctgctgcgcctggccgagcagcagcacgtgctggtgctcagcctccaccacatcgcggcggatggagtcgggctgcaggtgctcgaacaggagctggcggcgctctacggcgcgctgagcgctggggccgagccgcggctacctcccctgcccctgcaggtggcggaccttgccgactggcagcgccggtgggtggagggagaggagtaccaggtccagctcgcttactggcggcgacagctcgccgggctcacgcccctggaggtaccaggagatcatcctcgcccgcgtatcccctccatgagaggcgcggaggtacgggcgcccctgctctccgctccgcaagcccaggtgctgcgcgcgctggggcaaggcgagggcgccaccctctacatgacgctcctggccgccctgggcgtgctgctgcaacggtggacgggccagcacgatatggcggtgggcagcgccgccgccaaccgcaaccgcccgggcttggagggcatcctcggcttcctcctcaacatcgtcctgctgcggctcgacttgagaggccgcccccgcttccgcgagttgctgcgtcaggcacgcagggtgtgtgtggaggcctatgcccatcaggagttgcccttcgagcacctggtggaggcgctccagccaggcagcgagcgcggggacagctcgctctatcgcgtggcgctcgcggtgagcgacacgccatggatgcccggccacgggctgaagctggagggggtgcaagcgcagccgctcgactttccccggggggtgctggacctggatctccacctgtgggtgtatgacaccggggaggggctcaccgggcggttggagtacgccgtggatctgtatgaggagcccacggcaaggcggctcctggagggcttccgccaggtgctggaggcggtggtggaggcgccggatcggcccgtgccggagctgccggtgctgggagagcaggagcgccaccaggtgctctccgggtggaaccgcacacagcgcccctatccgcgagaggccagcgttcacggcctctttcagcagcgtgccctccaggccccgcgggccgtggcagtggtgtatggcgagcgcagcctcacctacggcgagttggcggagcgggcccgcgggctcgcacagggtctggtggcccgaggcgtgcggcgaggagacctggtcgcccttcggctggagcgctcgccggagcaggtggagtccatgctggccgtactccaagccggggccgcctacgtgccgctggatccttcctaccccgtacagcgccaggagttcatgctccaggacagcggcgcgcggttgctcgtgcacagcggcccgctgcccttcgctccccagggctgcgccacgctggatctccaggcatggcaccccgctccctccgacggtggcgagcccctgccccagtgcagcggagaagatctggcgtatgtcatctatacgtccggctccaccggccagcccaagggcgtggccgtgtgccaccgggccatgacccgcctggtgtgcaacacggactacgttcagctcgggccagaggatcgggtcgcccaggcttccaatgcctcctttgacgcggccaccttcgaggtctggggcgcgctgctcaatggggcacggctggtggggctcgccacggaggaggccattcaggcgcgccggctggccgaggtcctgcgcgagcagcggatctccgtgctcttcgtcaccaccgccctcttcaaccacgtggcccgggagcaaccccaggccttcagcaccctgcgctacctgctctttggcggcgaggcagtggatgcctccagtgtgaggcgggtgctgaaacagggcgctccaggacaccttctacacgtgtacggccccacggagaacaccaccttctccaccgcctggcgggtggaacacctggccgagcaggcgcataccgtgcccatgggtcatcccatcgccaactcgcggctgcacgtgctggacgaagcgctgcagccggtgccggtgggcgccatgggcgaggtatacctgggaggtgatgggctggcgctgggctactggcgccaccccgaggccaccgcggagcgcttcgtgccggatccgcacggcctggagcccggaggccggctctaccgcacgggagatctggcgcggcggcaggcggatggggccgtggtgttcgctggccgcgtggacaggcaggtcaagctgcgaggcttccgcgtggagccggcggagatcgagtcgcacctgtgcgagcactcggaggtgtccgcggcggtggtggagctgcggggcgaaggggccctgcggcggctggtcgcctatgtcgtcccccgcgccggtggccgcccaggtgccgaggagctgcgcaccttcctccgcacccgactgcccgagtacatgctgcccgccagcttctccctgctggaggcactgcccctcacccccaacggcaaggtggatcgctcggcgctacccgagagcttcgaggaggcctcccgcgagcaggctccggtggtacctccacgaggccccgtggaggcgctgctggtggacatctggagggaggtgctcggcacccaacgggtatccgtgcacgacgacttcttcgacctgggcggacactccctgctggccacgcgggttgtctcccgcttgcgagaggcgctgcaggtggagttgccgctgcgcaccctcttcgaggcccctcagctctcggcgctggcggcccaggtggaggtcctgctcggccaccggcagctccgcccccctccgctcgtgcccgctgtacgtccaccagagctgcccctctccttcgcccagcagcggctgtggttcctccagcagctcgcgccacaaagcaccgcctaccagatcctggatgcgtggcatgtgcggggccgggtggacgtgggcgccctggagcgcgccctggagcagctcgtgcgccggcatgaggcgctgcgcaccactttcgagcctggcggcgacggcgtgcctcggcagcgcatccacgcgccggctccggtcccgctgcggcaggtggacctgcgctcccatggcatcgccgcgcgggaggaggccttgcggtggatgcgcgagcaggcgctccggccactggagctggacaaggggccgctgctgcgcgtgtccctgctgcgcttggaagaggcacagtccctgctcttcctcgagctgcaccatatcgtgggcgatggctggtcgctgagcgtttggagccgagagctgtcgcacctgtacgaggcggcgctccatggcgctgagccggggttggcgccgctgcccgtgcagtacgcggacttcgcgctgtggcagcgcggctggttgcaagggccggtgctgcgggaggagctgacctggtggcgggagcggctcgcgcgcctggccccgctgcgcctgcccgcggaccatgcccgcccggaagtgcagcgcttcaacggcgcgacgtaccgcttcacgctcccgggcgtacgggtgcaggcgctgcggcggctcgggcatgagcacggggccacactcttcatggtgttgctcgccggcttcaatgcgctgctggcgcgctacaccgggcagacggacatcgccattggcgcgcccatcgccaaccgcacacgtggggaggtggagggcctcatcggcttcttcgtcaacaccctggtgctgcgcacccgcctggaaggcaacccctccttcctcgagctgttgaggcgggtgagggagacaacgctagaggcctacgcccaccaggagctgcctttcgagaggctcgtcgaggagttgcagcccgagcgccaggccaaccagaacccgctggtgcaggtgctgctcgccctgcagaacgcgccccgcgagccgttgcggctggcgggcctggaggccgagcacctggagtacctggtggccaccacgcgcttcgacctcgagctgcacctgtgggaggaggaagaggggctgagctgcatcgccgtgtatgaccgcgcgctgtacggcgcggggacggtggagcggctggtgggcgcctggtgcacgctgctggagggcgtggccgagctcccggcgcgccgcgtggcggagctgcccctggtgcctgcccgggagctgcgacaggttccgccgccctcccccgccgcggcgatcgaaacaagcatcggcgcccgcttctcggaggtggcgcggcggcagccaggcgccacggccgtcacccaaggcgggcggcacctcacctatgcagagctggaggagcgctcggaacgcctggcccgctacctggcctggctgggcgtgcgcgcgggcgacagagtggggttggccaccgagcgcacgctggagcggatcatcagcctgctaggcatcctcaaggcgggagccgcctacgtaccgctggatgtgcgccagccagcgcgtcggctgagcctgctggtgcaggccgcgggcgtgcgcaccgtcatcgccgaggagcaggctcgcacggtgctgtcaggcctggggcagccactgaccctggtcgatgccgcccaggagccggcctccgcgcagcaggtccccgcgctcgggccggagcgctcgctgggcggggacatgctcgcctacgtgcttttcacctcgggctccaccggcgagcccaagggcgtctgcattccccaccgtgccgtgctgcggctgatccatgagccctcctacgtccagctctcgccgcgggaggtcatgctgcactacgcaccgctggagttcgatgcctccaccttcgaggtctggggggcgctgctcaacggggcaaggctcgtgctggtccctccggaacagcagtcgctcgagagcctgggacaggagctgagcacccagggcgtcaccgtgctgtggctcaccgccgggctcttccggctcatggtggaggagcagctcaagagcctgcgcggcgtgcgccagctgctcgccggaggggacgtgctgcccatgccgcaggtacgccggctgcgcgaggccctccccgagtgccagctcatcaacggctacggccccaccgagagctgcaccttcacctgctgtcaccgcgtgggcagcccccaggagctgggcggctccgtgcccatcggcacccccatcgacctgggctgggtgagcgtggtggacgagcggctccagcccgtgccggacggagccccgggcgagctgctcgtgggcggccccgggctggcttgggggtacctgcaacacccggagctcaccgccgagcgcttcatccccgatccgctcagccggacgccgggggctcgcgtctatcggacgggagacctggtgcggcgcagggaggatgggacgctggagttcctgggccgcgtggaccaccagctcaaggtacgcggcttccgcatcgagccgggcgaggtggaggccgcggtgctcacccacccggcggtgcagtccgcggtggtggtggggcgcgagggccccggcggcaaggagctggtctgctacgccgtgccgcgggtggagagctcggagcagggctcgcagcaggagcagcggctggtacacgagtgggagtccgtgttcgacgggcacatgtaccgcgaagcccccgtgggcggagagccgaccttcaacatcgtcggctggaagagcagctacaccggccaacccgtggccgtggaggagatgagggactggctgcgccaccgggtggagcgcgtgcgcgggctcaggccacgacggatcctcgaagtgggctgtggtacggggctgatgctctttgccctgctgccgcactgcgagcgctacgtgggcacggatttctccccggcggcgttggactacgtgcgtcgctacctccccccggagcacccgggccgcgtggagctgctacaccgcacggcggacgagtggagcggcgtggcggccggctccttcgacgcggtgctgctcaattcggtggtgcagtacttcccctcgcaggagtacctgcggcaggtgctggcccgctgcgtggaggccgtggaggacgggggcttcgtcttcgtgggggatgtgcggagcttgccgctgctggagtccttccacgcctcggtggagctggagcgggccgccccctccatgccgctggaggcgtggcgcgagcgggtgcggcgtgcggtgctggaggacaacgagctggtggtggacccggcactcttcgtggcgctggcccatcagcatccacgggtgagccacgtggatatcgagctgacgcgcggcacgcacccgaatgagatggcacgcttccgctacaacgccgtgctccacatcgggccgcgcacgccgccaccggcctccgaggtgccgtgggtggactggtccacgcaaggactgagcctcgatgcactgcgggctcggctccggcagggcccgccagggccactgggggtggcaggcattcccaatgcgcgagtgctgcccgcggtccgggccgccgaggcgctgggcagcacaggcagcgcgcggcgggtggaggagctgcgccggcgcctgtcccaacccggcacaggggcccaggatccagaccccttctggcaactggccgagtcgctcggctacacggcggcagtgagctggtctcctgggcggagggacggggccttcgacgtgctcttcctcccggcgacgccagggatgcacccgcggtggctcggccccacgccgctcaaccgcacgccgcccccagcctccgcgcgtctgtcctcggagcctcggcgggccagcctctcactgaggctgggctccgcgctgcgggcccacctgcagacccatctaccagacttcatggtgccctcacgcttcgtggtgctgcagtccctgccgctcactcccaatggcaaggtggaccgcgcggccttgcccgtccccgactcgcgtcggctggaatctgccccgctggtgccccccagcaacgagctggagcgggtgctggcgcaggtgtggaaggaagtgctgggactggaggaagtgagccgggaggacaacttcttcgacgtgggagggcactcgctgctgctggcgcaggtgtgcagccggctggaggcccgactgggccggcggctcgaactggtgaccctcttccgctactcctccattgctgccctggccgagcacctgcaggccccccaggagctggcagccgccgaggcgcaggtgcagcgcatggccacggagcgcgccttgctccagcaacaggcagcccaacgccgccgggccggttcgaagcggggagctcccaatgacacctagtggggatgaagcgctgcagtcttccatcgccctggtaggcatggccggccgcttcccgggggccccggacgtggagtccttctggcgcaatctggtggccggagtggagtccatttccttcttctccgaggaagagctgagacaggcgggcgtgtccgagcagatacgtcggcgccccgagtacgtgcccgccaagggtgtgctggaagacctggagctgttcgacgcgggcttcttcggctactcgccgcgcgaggcgagccacctggatccgcagcaacgcctgctgctggagtgctcgtgggaggcgctggaggatgcgggccttcgcccggatcagctcccaggctgggtgggcgtctacgtgggcgccggggacaccagctaccgcttccagctgctgcgcggacacggggacccgctcagcggctccaaggatgtggcgggcttctttggcaactacccggactttctcgccacgcgcgtggcctacaagctcaatctgcgcggccccgcgctcggcatccacaccgcgtgctccacctcgctcgtctccatcaacatggcgtgcagcgcgctgcgcggcttcgagtgtgacatggcgctcgcgggcggcgtctcgctgcggctgcccgcgcgctccggctacctctacgaggaggggggagtcgcctcgaaggacgggcactgccgccccttcgacgcgcgtgctaccggcaccgtcacgggggatggcgtgggcgtggtggtgctcaagcgcctggaggacgcgctgaaggccagggatcccatccacgcggtgatccgcggctgggcgctcaacaacgacggcgcctcccgggctggcttcaccgcgcccagcgtggagggccaatccgaggtgatcgccctggcgcacgccgcggcgggcatcagcgcacgcgacatcacctacgtggaggctcacggcaccggcactcccctgggagacccgatcgaagtggcggcgctcacccgcgccttccgggcgcataccgctgacaccgccttctgtaccctcggtgcggtcaaatccaacatcggacacctggatgcggcggcaggagtggccggggtgatcaagacggtgcaggccctgcgccaccggctcatccctcccacgctccacttcgagcggcccaatcccgcgctccacctggagcagagccccttcttcgtcaacacccagccgctcccgtgggagagcccgcgcgggcctcggctggcgggggtgagctcctttggcattggcggcaccaacgcccacacgctcttcgaagaggctccgccgccgcccgccagcggccccacccgtcccaaccaggtgctgctgctctcggcccgaagcaccagcgcgctcgagcacatcgcaggacggctcgcggcacacctgcgccgccacccggacctggaactggcggacgtggcctttaccctccaggtggggcgagcccgcttcccctaccggcgcgccctcacctgtcgcaccctggccgaggccatggagcgcctggaggctcccgagccgcggccacccgagccgcttgctcacgagggagagcggccccctctcgtcatgctctttccagggcagggcactccgctggtcggcacggcccgtgcgctccatgaatccgagcccaccttccgccaggcggtggagcagtgtgcccggctcctgaggcagacgctggggctggatgtcagggaggtgctcttcccctccgcggagcaggaggagcaggcacgccggctggcggcgcagacgcgggtggcccagcccgcgctcttcaccctggagtatgccctggcgcagacctggctgggctgggggctccaaccgcaggcgctggcaggccatagcctgggcgagctggtggcggcgtgcctcgcgggtgtcttctccctggaagatgcacttcagctcgtggcagcccggggacagctcatgcagggatgcccaccgggggccatgctggccgtgccgctgccggaggccgagctggcggcgctgctgggcagcgagctgtgtatcgccgcggtgaacgggccacgggcctgcgtggcctcgggtcctctaccggcggtagaggcgctcaccgccgcgctggagagccggggcgtgtccagccggcgcctggagacttcccatgccttccactctgcctccatggaggcatgccaggggccactcaccacgctgctgcggcgcatgcgcctgcaggcccctcgcctcccctgtgtctccggcctcaccggccggtggctcaccggcgaggaggccacggagcctacgtactgggcccgccagctccgcgagccggtacgtttctccgaggccctcgagacgctctggagcctcaaggagccagtgctgctggaggtaggccccggcaccacgctcaccgcgcttgcgcggcggcaccccacccgccccgcccgcacccaggaggtggcgagccttcccgtgcaaccggacacggccgtgccgtgcattgaagaggccgtgggtgagctgtggcaggccggcctggagctggactggagcgccctgcacgccgcgccacgccaccgcgcacaccttccaccctaccccttcgagcgccagcgctactggattgaaccggaggctgccccgcagccgcgcgcgcagcagccgacgcccgcgtcccttgtgcccccggagcagccctcgcgcgaggccctggaagactggttctacgtgcccacctgggagcaggcacctgccacgagcggggggggacagcccctggcgggcccggtgctcgccttcatggactcctcgggcctggccgagcaggtgctggccgcgctgtggcccgcggactccggcgcgctcctcacccgcgtcgagccggccgggcactatgagcaactcagtgagcacgccttccgcctccgccccgagagcgaggaggactgggacgcgctcttccaggcgctccagtcccagggccggctcccccgtcgcatcctccatgcctgggctctcaccgcggagcccggcccctgtaccccggacggggaagcggtgctggaacagggcttcttcagcctgctgcggctggcccgtgcgctcggccgccacgcgcctgagcgccctgtacagctcgaggtgctgtccagcttcgtccacgcggtgggcccgcgggagccgctcgagccgctcaaggccacgctgctgggggcctgtgcggtacttcccctggagtaccctcacgtgcagtgccgcaccattgacgtgcggcccgggagcgagccacgggaagtgctggtgaggagcctggccgccgagctggccgctcccatgggagagagcccggtggcctggcgcgacgggcagcggtacgtgcgccgcgccacccggcagaggctcgaggcctcgcggcccctgcgcagccttcgggagcgaggcgtgtacctggtagcaggagggctgggtggaatcggcctggtgctggcgcgagcgctggcccagcgggcgcgtgctcggctggcgctactcacccactcgcccttccctccccgagagcagtgggagcagtggctggaggaagccccggcgcacccggagccggcgtggcggagcgaggccgacccctcggagcgccgcaggacccagcaccgcatccgctgcctgctggagctggagcagctcggcgccgaggtgcaggtgtacacggcggacgtggcggaggaggccgccgtgcgctcggtggtggagcaggtgcacgcccgctgggggaagatccacggcgtgctgcacgccgccgccacgttcgacgacggcgtcatccagctccgcacgcacgagcagtcctcgcgggccctgcgcaccaaggtgcggggcagcatggtgctgcacgaggtgctggcgagcgaggggttggattggttcgccctgtgctcctcgctggcgtcggcgctgggctcattcggccaggcggactactgcgcggccaatgccttccaggatgcgtatgcgcaccacctgcgccggcagggcttcacgggagcgctggcgctggactggggcacgtggagagatacgggggcggccatgcggctggtggcacgcacccgacgggggggccatgagaagccgcccacgccgctcacccacccactcttcgattgcgaacagcgcgagccgggcgggacgcactggctcggcctcacgctgaggggtggagaggactgggtggtggacgagcaccggctgcaaggggtgccaacactgcccggggtggcctacctggagctggcgcgggcggcgtgtgcccaggcgctgggggccgaggcggtggagctggcggagctgttgctgctggagcctctgacggtacctcgaggcgaatccaggcaggtccgggtggtgctccagcccgaggggcaggctcatgccctgcgggtggagagccggtcggaggaagcgcggggatggaatgagcatgcgcggggccgggtgcgcgccgtgcctcggctggccgagcgcatccagcccgagctgctgcgcgccgcctgcgaacacgagcagcccgtgcccggagagccccaggagcaaggccctgtccacgccggagcacgctggcatggcctcttccagtgggttcgccgcggccctcgccaggccctcgcccagctcgcgctaccggagcccttccacggtgacctcgagcgcttcgagctccacccggcgctcatggacatggccaccagcttcgccattcccggcggagtgccctggctcgcctttggctatgagcgcgtgctcattcacggtccgctgccaccgcaggtgctcagccacgtgagcctgcccgaggagtcgcaggctggcgcgcaacaactccggctacaggtgcggctgctggatctggagggctgggagcgggtgcggatcgatgggtacctgctgcggccgctgaagcccagcgacgccagtgtcgagccggcggcgcccaacgtggaagtcgccgtggggacgccggggctgctggagagccttggcctgcgccgctgcacccgccccgcccccgggccgcgccaggtggagatcgaggtggaggccgctgggctcaacttcctggacgtgctgggcgcgctggggatgatgccggcattggaggcggaggagagcgtactggggcgcgagtgctccggacgcattgccgccgtgggcgagggcgtcagcgggctgcgcgtgggggacgaggtgctggcggtggccccaggctgcttccgctcctacgtgctggtggatgagagccaggtggtgcgcaggcccgcctcgctggggctcgccgagggggcggcccagatggtgccgttcgccacggcgtacttcgccctgcacaccgtgggccggttgcggcgcggcgagcgcatcctcatccacgccgcggccggagggctgggtctggccgccgttcagctcgcatcccggaccggggcggagatattggccaccgcgggcagtgagcagaagcgcgagtacctgcgctcgctcggcattgctcacgtgctggactcgcgcagcacctccttcgtcagcgaagtgcgcgagcgcaccggcgggcgtggggtggatgtggtgctcaactcgctggcgggagagctgctcctggcgggcctgtccgtgctggccccgcacggccgcttcctggagctggggaagagggacctgtatgcggaccagcaggtgggcctccgaaccctggcccgagggcagactttcgccgccattgacttcggtccccaccacccggacttccgagcggtgctcgaggaggtggccacgcaactcacccagggccagctcgagccattgcccacccgcctcttccccgcgcggcaggtggccgaagccttcagcttcatggcccgcgcgctgcacatcggtcgcgtcgccgtctccatgcagggggcgacggcattgcccgcgtccatgactcggggctccaggcccgcaccggtggccgtacctccttgggaggacccgcggctggcgggcggcatctcctctgaagagggtgcggaggccttcctgcgcgcgttggagcaaggggcaccgcagctcatcatctccccccaggacttcagctcgctgctgcgcggcctgggcggcagccagggcgtgcgcgaaaaggagcgcctcgtcaccgggcgcgccgccgccgccgagccgcaggccttgccaccctcctcgctggagcagctcatcgagcaggtgtggcgcaagcacctgggtgtggagcgcgtgcagcccacggacagcttcttccagcttggaggagactcgctgctgggcatccaagtggcggcggatctccgcaggcacctgggtgtggagctgcccacggccaccctcttcagccaccccaccctcgccgcgctggccgcggctctgcgggctcgacagggtgaggccgcggctcccactgcccccgcgccagcgctcgtgccggatccagccgcgcgcttcgagcctttccccctcacggatgtgcaggaagcctactgggtgggtcgccgctcggccttcgagctcggcggcgtcgccgcccatggctacttcgaaatcgaaagcccggggctggaggtggagcgcttcatccaatgctggcgccagctcctgcagcgccacgacatgctgcgcatggtggtgctcccggatgggcggcagcaggtgctcgagcaggtgccggagtacacgccggaggtggtggagctgcgggggctctccccccaggaggccgagtcccgccggctccagctgcgtgagcgcatggcccaccaggtcctgcgcagcgaccgctggccgctcttcgagctggtgctctgccggtacgagggaggcgtccgcatccacatgagcatggatgccctgatgctggatgcgtggagttcagcggtgcttcggcaggacttcgcccagctgtaccacgagccgggccggccgctggagccgctggccatcaccttccgcgactacgtgctggcggagcgccggctgcgcgagggcgaggcccatgagcgcgcccgcgcatactggtgggctcggctggacacgctgccgccaccgcccgagctgcccctggtgaaggaaccctcgcagctggagcacgcgcggttcacccaccgcgaggctcggctcgagccacaccgctgggcccggctccaggagcgggcgcgcgcccacggcctcaccccctcggccgcctgcatggccgccttcgccgaggtgcttgcccgctggagccgtcacccgcgcttcaccctcaacctcaccctcttccagcgcttgcccctgcacccgcaggtggacgagctggtgggcgacttcacctccctggtcctgctggaggtagaggcacacgcggcgagcaccttcgccgagcgtgcctcccggctccaggcacagctatggcgggacctggagcacggcagcgtgagcgccgtgcagctcatccgcgagctcgtccgcaccggccgccgctccccgggcgccatcatgcccgtcgtcttcaccagcatcctcagcctggatgcgcggcgcggcccccagggcagcctctccttcttcgagggagaactggtgtacagcatcagccagactccccaggtgtggctggaccacggagtccacgaggaggagggggcgctcgtcctggcgtgggactcggtggaggcgctcttccctccgggcatggtggacgacatgttccacgcctaccagcggctgctgggggcactcgccgaggaggagcaagcgtgggagggcgagctgccggagctgctgcctcctgcccagcgtgagttgctcgcgcgctacaacgccacccaggcgccgcggcccagcggacggctggaggagggcttcttcacccaggcgcggctccaccccgagctccccgcgctgctcgcaccggagcgcaccctgagctacggcgagctggcaaggcgagcccaggcgctggccgcgcgcctacgcgagctggaggtgcagcctcaggagttggtggccattgccatgcacaagggctgggagcaggccaccgccgtgctcggcgtgctgcaggcggccgcggcctacctgccgttggatccagagcagccgccgctccggctccaccagctcctggaggaggggcccgcccgcgtggtgctcacccagtcctccttgctgcacaccgtgccctggccgccgggtgtgcaggtgatcgccgtggacgaactcgagcctgcaaccgaggcccccccgctaccgcctcgcggtacaccggagcacctcgcctacgtcatctatacctccggctccaccggcaaacccaagggtgtggccattgaacaccgggccgcgctcaacaccgtggtggacctcaacacccgctttggcgtcggcccggaggatcgggtgctgggcctgtccgcgctcaccttcgacctgtcggtgtacgacgtgctggggctgctcggcgcgggcggagcgctggtgctgcccgcggcggaggcggagaaggatcccgcccactggtgggagcggctggtggctgggcgggtcacggtgtggaactccaccccggcgctgatgctgctgctggtggagtacgccgagcagcgcgggctgaagctgcccgcggcgctgcgcctggtcatgctcagcggcgactggatccccgtggcgctaccggatcgcatccgcgcactcggcagggacgtgcaggtggtgagcctgggaggcgccaccgaggcttccatctggtccattgcctaccccattggccaggtggcaccgcagtggaagagcattccctatggcatgccgctggccaatcagcgattccacgtgctggacgggcggctggaggcacggccctggtgggtgccgggcgagctgtacattggcggcgaggggctggcacgcgagtactggagggatgagccgctcaccgcaacgcgcttcatccgtcacccgcgcacaggcgagcggctgtaccgcaccggggaccaagggcgcatgctgcccgaagggagcatcgagttcctcggccgggaggatctgcaggtcaaggtgcagggcttccgcgtggagctgggggagattgaagcggcgctggcccagcacccggcgctatcggcgagcgtggtggtggcacgaggagagcctcggggagtgcggcggctggtggcctacgcggttcctcgctcgggtcagacgcccgcggcaggcgagctgcgccgctacctggcggagcggctacccgcgtacatggtgccctccgccttcgtcctcctggagtccctgccccgcagccgcaacgggaagatcgcccgagatcagctccccgagccgcagcagacacagggactggctgcacaggccgcggcggccgacccgctcgtggagcggctggcagccctggtgaaagaggcgctgaggctcgagcgcgtggagccccaggacagcctgctggacctgggggcggactcggtggcgctcatccgcctcatcaaccgcctggaggcagagctgcagttccgcccgcgactggccgacatctacgagaaccccaccgtgcaggggctcgccacgctccaccaagagaagacaaagagccagggagagggaggcgctccgcggctcacggcgccccgctccacgcttctgcccgccgaggagtgggggcgcttcaaggccaaccgcccgggcctgcgccgcttccccgatggaacgcctgaggtggcactgccaggcagcggcttggcgccggcccccgaggagctgacagctctcgagcgccgccgcagtgtgcgcacctactccctcgagcccgtgagccatgagcagttgggacggctgctggcccccttgcgcgagtgggaggtgcagggctcgcggcgttacctctacgcctccgcgggcgggctctacccggtgcagctctacctccacctcaagcccggccgggcgcgagggctcgagcccggcacctggtattacgatcccagcacccatcggctggtgctcctgtccgccggagccgggctggatcgccgcatccatgatccgcaccagaaccaggccatcttcgactcggccgcgttctccctcttcctcatcgcccgcatgggggccgtggagccggtatacgccgaacatgccctgcacttcgccacgctggaggcagggctgatgacccagcttctcgatctgggcgcggctcccagtgggctggggctgtgccatatcggcgacctggacttcgcccaggcgcgggggctcttccacttggaggaggagcacgtgctgctgcacagcctggtgggcggagtactccccactcgggggcaggaggcggcctcggtgcccgctgagggaggaacggaggcgcggcaactggcgcagctcctgcaacaggtgaagacgctcacgcccgaggccgcgcgagcgctgctcgaggcccgccgcggcagcaaggggagaccacatgagtaagctgcacgaggagctggagagcctggcgccggagcagcgggagctactcgcggccctgatgaaagagcagggcctggacgagggcgcattgctgatgcccgtggagcgcaagcccgaggggctgccgctctcgtccgcccagcagcgcatgtggttcctgcaacagctcaggcctacgagccccttctacaacgtgcacgcggcgctccggctcacgggaaagctgaaggtggagtgcctggtgcacagcctgaatgagttcgtccggcgtcacgagccgctgcgcacggtgttcccctccgccggaggtcaacccctgcagcgcatcctcgcgcccgcaccggctgcgctcgagcagcgcgacctgagcggcgtgcccgcccaggagcgagaggccgaggtgtaccgcgcggtggagcacgcagcgctcgcctcctttgatctggagcgagagccgccgtgccgcttcctcctggtgcgagtggagccggaggaacacgtgctggtgttcgccacgcaccacatcgcagcggatggctggtcgctcggcgtcttcgtgcaggagctgtgcgcgctgtacacggctgctgtacacgcggagccaccggcgctgccaccgctgcggctgcagtacgcggacttcgccgcgtgggagcggagccggctcaagggtgggcgcgagcgcgagctgctcgagtactggcaggagcagctggcagggctgccggacctgagcaccctgccgccagagcggcccaggcccccgctgtccaagcaggagggcgccacgttcgaattcgccctgccaccacaccaggtgcaggccctgcgctcacttgctcaagcgcggcgcacctcgctcttctccgtgctgctcgccgccttccaatggctgctggcccggtgcgccggccaggacgacgtggccctgggcatgcccatcgccaaccgcaaccgcaaggagctggaaggcctcatcggctgcttcgccagtaccctggtgctgcgcgcgaagccctccgcctcgaccgccttcacctcatggctcgcccaggtgtccgagcagctccacggcgccctcgagcaccaggaggtgcctttcgaacgattggtggaggtgctccagccccggcgccgcatggatcggcacccgctcttccagatcttcctcgccatgcagcagcacccgctgcggcgcgccgagctgccaggcctgctgctctcggagttcccccttcgcagccgcgtggcccgcttcgatctggagttccacctctgggagtctgcccagggcgtcgagggcaccctcatctacgacgtggacctgtatggccaggagggcgtagcgcaactggtgcggcgctacgtgagcctgctcgaagccgtggcggcggacccgacgcggacactgggggagctggcgggtgagacgctggccccgcccgtacggaagcaggttctcgccctgtcggagtgtccgcccctcccacgcccgagcacagcccctcggacactggccgaggcacttctacagaccgccgagcgcttccccacggccacggtcagcttcgtccaggcacagggctcttgcacggcctggactctgccagagctggtggagcgggcccggcgcctgcaggccggcttgcggcagtggggattgcggccgggcgacagtctggtgctggtgctggggagggaggaagagacggtagaggcactctgggcctgcgtgctggcgggagtggcgcccctggtgctaccggcgccgcccgcgagagcggaggcgagtcccgcgctctcacgtctgcggcatgcccggcagctgctgggtgggccccgggtcctcacccggcaggagatgctgcccgatcttgccaggcagcttcaggtctcgcccaccgccgacatcctgggggccgtggaggagctgagagccacgggtggcgaggcgcccctgcccccagggcgcatggatgacgtggccctgctcaacctcacctcgggcaccaccggcaaggccaagtgcgccatgctcacgcaccgcaacctgctggtgcgcctggaggccaccaacgtcgtctacgagtcccagccgctcgagcgcggcctcgtctggttgcagctgcacaacattggcgccctgtccgagtaccacctccgcccgctctgcgccggcatgcacaccttccacgctcccaccgaggaggtgctcgccgagcccctgcgatggctggagtggctcgagcggtatggcattgcacagacgtgggcgcccagcttcgcctacagccacctgctggagcggctgcgcaaggtggaggaccggcgctggagcctgggaggcgtgcgcgtgctgctcagcgccggagagcagatctccgcgcccatggtggaggagctgatgcggaggttggctccctcgggagtgcgggaggatgccttcgtcgctgcctggggaatgaccgagacggcttcgggggtgacctatgcgcggcggcccggaacgccgccccgcatgcacaccctggagcgcgcgagcttgagcggtccgcttcggcacgcggcacccgcttcgcccaccgcgctgcggctgatggatgtaggagcccccattgccggcaccgccctgcgggtggtggacgcgagcggcgagctgctctccgaggagtgcgtggggcgcattcaagtgcgcggcgagatgatctctcccggctactacggggacccgaaggcctcggcggcgctgctcaccgccgacggctggctggagacaggcgatctgggcttcctctccgagggagcgctgaccattaccggccgcgccaaggatctggtcatcatccacggcaccaacttctcctgctacgagatcgagtccgcggtggagcaggtggagggagtggcgccctcctcggcggcggcggcggcggtgcggatgctcgaggggagcagggaggagctggcggtcttcttcgtgcccacggagggactcgctccgcaaccccctgcctcactcctgtcgcgcatccgccagcaggtgctcgagcaggtgggggtgcggatcgatcatctcatcccgctcgagcctcaccagctcccacgcacggagggaggcaagctgcgccgctcggagctgagggcgcgcttcgaagcaggtgagctgagggcgccgcaacccgctccggtcccgagcccctcgcgcccgctggagcagctcatcgcctccgtctgggcggaggtgctcgagcaccaggacatcgcgcccgaggccagcttcttcgacctgggcggcaactccatcctcctggtgcgcgtggagcgggcactgcgcgcgcggctcggcctggagctgacgctcatggacctgttcgcctaccccacggtgcactcgctggcggactacctggagcctcgagccgcccagctgccagcacaggcctcccctcccacgcaggccgagcgccggcgggggatgcgcggcgcggcgctggagcagagacgcactcgccgccaggcacaacgggacgaggactagacacgcatgagccacgacacgcagctcgagggagccgtagcggtagtggccatggcggggcgcttcccccaggcccccaccctggaggactactggcgcatcatccacgagggcgtggacgcctttacccagctcacggacgaacagctcctggcctccggagtggggccctcgctcctgcgccaacccggttacgtgcggcgcgccgccctgctggacaggatggaccagttcgacgccgcgttctttggcttctccccgcgagaggcggaggtgctcgacccacagcaccggctcttcctggagtgcgcgcacgaggcgctggagcgggccggccatggctccgagcgcgcaagggggcgcgtgggggtcttcgccagcgccagcctcaacagctactacctgcattccctgcacgggaacgcccggctgagggaggtgctgggagacttccagctcgccatcgccaacgacaaggacttcctgcccacccgcgtctcgtacaagctgggcctgcgcgggcccagcgtggcggtgcagacggcatgctccagctcgctggtggccgtccacctcgcgtgccagagcctgctcaatggtgagtgcgccctggcgctcgcgggcggctcctctctctccgtgccccaggcccagggctacctctaccaggagggaggcattgcctcaccggacgggtactgccgccccttcgacgcggcggcggcgggcaccaaccgaggcaacggcgtgggggtggtgctgctcaagctgctcgaggaggcgctggcggacggagacaccatccacgccgtcatccgcggctcggcggtgaacaacgacggggcacacaagatcggctacaccgcgccaagcgtggaggggcaggcctcggtcatctccgaggcgctggaggtggcggccgtctccgcggacagcatcggctacgtggaggcacacggcaccgccacggccctgggagatccgatcgaggtccaggccctcacgcgggccttccgcaagcacacggagcgccgcggctactgcgctctcggctcggtcaaggccaacatcggacacctggatgcggcagcgggcatcgccagcctgatcaaggccgtgctggtgctggagcgccgccagctcccgccatgcccgcacttcacctcccccaacccacgcatcgacttcgagcgcagccccttctacgtgagcgggcgggggcagccgtgggagccggtggacggcccgcggcgcgcgggcgtcagctccttcggtattggtggcaccaacgtgcatgtggtgctggaggaggcgccgccccggccggcgccgcggcgggcagcgcggccctaccagctcctgccgctgtcagcacgcacggagcgcgcccgggaggaggtcgaggcccggctgcgcgagcacctgcgccagcagccccaggagccgctggaggaggtggcccacacgctccaggtaggccgccgccacatggcctggcgcacagcgctggtgagcagcagccctgcccaggcggtagagctgctggagaggcgccgacccgaggcgctgctgcgtggccagagtgcggcccaggcccgctccgtggccttccttctaccgggccagggctcacagtacgtgggcatgggagcggcgctccatgagtccgaggcgcccttccgtgaacaggtggatctctgtgccgggaaactccagggcgtgctcgggttggacgtgcgccgcctgctgtaccctggcccgcgggagcgggaatgggcccaggagcgcctgcgggagacgcgggtatgccagccggtgctcttcaccgtggagtacgcgctggcccgactgctggaggcctgggggatacgccccaccgcgctgttgggccacagcctgggcgaatatgtggccgcgtgcctcgcgggcgtgttctccctggaagaggcgctggaggtggtggccgcacgtggacagctcatgggcagcatgcccccggggggcatgctcgccgtggggctcccagcccaggaagtggaaccgctcctacccgcggcactggccctggccgcgcacaacagcccccaggcctgtgtggtggcgggccccaccgagcccctggccgagctgcgcgcacgactcgagcagcggggcatcgcgtgcacgcctctggctgtctctcacgccttccactcgccgatgatggagccggcggtggccccattcgtcgcccggctgcgccggatgcatctgcggcctccgagcctgcccttcatctccaatgtgactggcacctggatagaggccgaggaggcgacctcaccggagtactggggccggcacctgctgcagccggtgcgctttgcccaggggctggagcggttgtgcgagggtgtgcagccgcggctgctgttggaagtggggccgggccacacactggggcggctggcggcgcgccaaagctccggccccgtgcaggtggtgtccacgctgggctccagccgggaggaaagctcggaggtggagcggctgctgacggcaatcgggcgactgtgggtggagggagccgaggtggactgggctgggctccaccgcggcgaacgccggaggcgcgcggtgctacccacctacccttttgagcaccagcgctactgggtggagacagccccccagccttcccctcccgagcggcctgggacacctgccgagagccctgtcaccagcagcttctacgtgccaggttggagccgcgcggctctgccctcggcggccccctcgagacgggtgggccggctgctgttgttggcggaggcccatgggtggagccaggggctcgcggagcggctccgggcccggggacactccgtcaccctcgtcgagccaggtgagcggctcgagcgcctgaccccggagcactggcgcctgcccccgggccgccgcgaggacttccaacgcctgctggaggactccggagagctgccctcgagggtgctccacctctggctgctggggagcagccagagcccccaggagcgcggcttctacaccctgctggcgctggcccaggcactgggagcccacggcacccggcccgcggtggagctcacggtggtgaccgatcagctctacgcggtggcagagggcgagccgatacagccgctcaaggcgctcctgcagggccctgcttccgtgcttccccaggaactccccgggtgcacgtgccgcctcgtggacatggccctgccgccaggcggcgtggcggaggagctgctggagcggctggtggcggaggtggagtccaccgcgtccgaacgctcggtggcgtaccgcggcgcggctcgctgggtgcgcgagttcgtccccgtgccgctgcccccgcccgagccttcgcagctcccgcttcggcagagaggggtgtatttgattgtcggcggcctggggggcgtagggctcgcgctggcagagcacctggcgcggcgcgtgtcggcgcggctggtgctcacgggccgctcgcccacgccaccgcgcgagagctggagcgcatggctgggcactcccacgcggctgcggctctcacaggagctcgagtggctgcgcggtgccgccgagcagatcgagcaccagcggcccctgcactccctggccgacagtcccggcctggaagagtcgctgcgcctgctgtgcgccagctacctctaccactttctcttccctcttcaggcgcctctgagacttggagagccgagggcgatgcaggcattgcgtgagcgcctggggctgcagcccggcttcgagcgcctcttctccttcatgatcggcaccctggagcaggcgaagctgattcgagtgggagagggcatgctcgagggtcaggtggagccagcccacgtgcccacacctcgagcactgcacgagcgactgctcgaaggctacccggaggtgtcaggcctgctggagctgcttgagcattgtgtgcgccactaccctgaggtgctccgagggagcctgccggccctcagtgtgctctacccctcgggccgctccgaggaggactccgcacgaagcggggtcgagtggagcagcatggggcagtgcgtggcgctgctgcggcatttcctcgcccgccatgccgagcgcacgcaggggcgtaccctgcgcatcctcgaggtgggcggcggcagtggcgtggtgctccaggccctgctgccgctgctgcggcaccacccggtggagtaccacttcacggatattggcccctccttcgtccgcgccatggagggagtcggccgccgccagggcctcaccttcctccacacctcggtgctggacatctcccgccctcccccagagcagggccatccgcctggctcgtatgatctggtgattgccctcaacgtggtgcacgccaccccgcgcgttcctcagtccctggcccacctcgagagcctgctcgtcccaggcggccacctgtgcctggtggagacggtgaagcagcagccctgggtggacatgatctggggtttggccgaggggtggtggagctacgaggacgagctgcgcacccgctctcccttgctggaggtaggcgactgggagcacgccctgcgcgacgtgggctttgccgaggtggaggtgctgccagcggccgtggagcagcgctcacgctgggacaacgtgctcctcattgcccagcggcccggcgagagcgggcttcagccagtgggcgggcgcgcggccatgcaggagcggatccgccggctgcgggccattgaagaagcgggaggcgaggtgctgcccctggtggcggacgtcaccgatcgggagcgcatgggcgaggtgctcgccgaggtgaagcgccgccatggggcgctccatggggtgatccacgccgcgctggtgctggaggatgggctgatgcagctcaagacgcgcgagtcggccgggcgcgtgctggcctccaaggtcgagggcaccctggtgctggacgaactgctgcgcgacgagccactcgacttcttcgtcctgtgctcctcgctgagcgcattgctcggcgcgctggggcaggcggactatgccgccgccagtgccttcctcgacgcgtatgcgcactcacagcgagggcgcacggaccgccgcaccatctccatggactgggatcgctggctggaggtgggcgccgccatgcgcctggggctggggctggcggcgggagcactggggctgcagcgcacggcacccggagagtacacggtgcgatggcaggccgagcgctgctggtggctggacgagcaccgcctggaaggacgggccacgctgccgggggtggcgtacctggagctggtgcgagccgccctggtccaggaactgggcgaggcccccgtggagctggagcaactggtgctgctctctctgctggaagcgcccgcgggggaggaggtggaggtgcgattccacctgcgaccggaggatgagggctatgcgctggagatccgcagccgggctggcggcctcgcgaatgggggctggcgcagccatgcgatgggccgggtgaggatgctgcctcgcgggagcgctcgacccacccacccgctacgggagctggaggaacggctcggcttgacccaggcgccgagggagcatgagccagctcagggcccccgcgagctggcacctgccctgggccggcgctggtcctcgctgagctggcaccgcgcgtggaagggagaagagggcctggccttgatcgagctccccgaggagctggccgaggatctgcggcaatggcccctgcaccctgccctgctggacgcggcgaccgggtttgcaccgctgccccccggtgcctggctgccgctgtcctatggcaacacccgcatccacggcccgctgccgcggcagctgtacagccacatccgccggctggagcccgccagtgcccaggccggagtggtgcggctggaggtgcgcctcatggacggcgaagggcgggagctgctgtgcgtggaggagttcgtgctccgccgggtggaggtggactcgttggctcggccacagcccgctggcaaggctccgcgccaggcagtgcttccacgaccaggcgcgctcgactcgctgcgactgcaacccctggagcgccttccgccgcaggagggagaggtggaggtgcaggtgctcgccgcgggcctcaatttcaaggacgcgctgctggcgctgggggcgttgccagtggagctggccaacggcgccccactggcgctgggagtcgagtgcgcgggcatcatctccgcggtaggtccaggagtgagaggcctgcgagtgggcgaggcggtggtggccgcggcagcaggagccttcgcctcgcatgtgcgagtcccccaggagcaggtcttccccaagccagcgggcctgagcttcgagcaggcggcgatggtgcccgtcactctgttcaccgcctggtatgccctggaggagctggcgcggctgcgcgcgggagagcacgtcctcatccacgccgcggccacgggggtgggactggcgggggtgaagttggcgctgcggcggggcgccacggtgtacgccaccgcgggcagcgagccgaagcgcgagctgctgcgctccctgggggtaacgctggccatggactcgcgcgcgcccgggtttgacgaccagcttctgcaacacacccaggggcgaggcgtggacgtggtgctcaactcgctgagcggcgagttcctctcccgcagcctgggcgtgctcgctcgccacgggcgcttcgtcgagctgggtgtaagggacatgctctctggcggcacgctgccgctggctcccttcgagcgcgggctcaccttcctcgcggcgcagatagacccggggatgaagggctaccgggagctgatgggcgaggccctgcggcagatcgagcgcggagagctggagccgctgccctacacggcatggccactggagcgcgtggccgaggcgctccagctcgtctccaagggcaggcacgtaggcaaggtggtgctcaccccggaagagcccttgtcacggccgccagcgctcccgagctcctcaaggccagtgcaaccccgggcaggcgtggcgattgtcgggctgcgctccgccgagggctgcgaggccttcgagcgcatcctcgcggccggcctgccgcaggtggccgtctccacccgtgagctgcgcgcgcgcatggcggagatcgagcgcctgcgcgtctcctcctgggagccggcgcttccctcggtgccccgcggctcccccgccaggaccgaacgctccaagccctatgttgctcctcgcaccgagcgcgagcgcgccctggccgcgctctggcaggacctgctcggcgtctccgaggtggggttggatgatgacttcttcgagctgaaaggggactcgctgctcgccatccagctcatggggcggttgcgcaaggagctggaggtggaattgccactctcctccttcctcgcccgccctacgctgcgcacactgctctccgccatgccagccccggcaacggacgagcctgcctcggccaccggggcaatcccagccgccgctccccagccgtcaccggctgtctccagcgaacccgctcggaagtggcgccacctggtgcccatccaacctcagggcgagagccctcccttcttctgggctgcgccgctgatgggcaccgtgtttccctacttcacgctggcccgctgcctggcgcccacccaccccttctatgctctccagccgccagggttgcaggaggggcaggagcccatggacaaggtggaggaactggcggccctgtacgtgcgcgagctgagagagctgcagccgcgagggccctaccgcctgggaggctggtccttcggctgcgtggtggcttatgaggttgccctacagctcgaggcggctggagagcaggtggcgctgctgagcctgctggacttccctgccccttcgggccagcgagccagtctctgggcgacggcccgcttcttcagcggctcggtgctgcgcggcctggcgccctatacgctcgactatctctacctggcggctcgcgctcctctgaatccagacgctgcctcgcgcctgagcagctccctgacccgaggatgggagcgcctgcggaaaggagggctggtgcaggaactgctggaccatgccgccatggcccgggtggtgcctgaggactcacggctgctgctgctgcgagagcctggcattgcccccatgttgaggctgacccgggctcaccagcgagccatgctctcctatcggccccgaggtcgcctccgccagcgcatcgtcctcttccgcacctccgagcaggcctggagcttcgcgcgagacctgggctggggagccctcagcgcctcgggcgtggatgtgcgcgaggcgccgggagaccatatgacgctgctgcggccacctcacgtggagcgggtggcagagcagctccgggccctgctcagctccgcgcctctcccgactcgccgctgagttcgggctgcgcgccagaggctgcctcatgcatgccctttggcagccagcccgagctgtccacccactccagcgcctcgctcagatcgtgcttttcgacgatctgatccaaggtgaccacctgcgcttccacgctgttgcccagatgagagggcacccgcggatc
